(19) United States
(12) Patent Application Publication
(10) Pub. No.: US 2015/0322452 A1
(43) Pub. Date: Nov. 12, 2015

(54) COMPOSITIONS AND METHODS FOR INCREASING PLANT GROWTH AND YIELD

(71) Applicant: Donald Danforth Plant Science Center, St. Louis, MO (US)

(72) Inventors: Lin Wang, St. Louis, MO (US); Thomas P. Brutnell, St. Louis, MO (US); Todd C. Mockler, St. Louis, MO (US); Douglas W. Bryant, St. Louis, MO (US)

(73) Assignee: DONALD DANFORTH PLANT SCIENCE CENTER, St. Louis, MO (US)

(21) Appl. No.: 14/708,823

(22) Filed: May 11, 2015

Related U.S. Application Data
(60) Provisional application No. 61/991,949, filed on May 12, 2014.
(60) Provisional application No. 62/023,432, filed on Jul. 11, 2014.

(51) Int. Cl. C12N 15/82; C07K 14/415

(52) U.S. Cl. CPC C12N 15/8261; C12N 15/8222; C07K 14/415; C12N 2830/002

(57) ABSTRACT

Compositions and methods for increasing plant yield are disclosed. Compositions comprise transcription factors that find use in modulating the expression of a gene or nucleotide sequence of interest in a plant. Additionally, promoters and cis-regulatory elements are disclosed that may be used to drive the expression of a nucleotide sequence of interest in a plant. Methods for the use of such compositions as well as transformed plants are disclosed.

### CROSS-REFERENCE TO RELATED APPLICATIONS

[0001] This application claims the benefit of U.S. Provisional Application No. 61/991,949, filed May 12, 2014, and U.S. Provisional Application No. 62/023,432, filed Jul. 11, 2014, the contents of both applications are herein incorporated by reference in their entirety.

### REFERENCE TO A SEQUENCE LISTING SUBMITTED AS A TEXT FILE VIA EFS-WEB

[0002] The official copy of the sequence listing is submitted electronically via EFS-Web as an ASCII formatted sequence listing with a file named 462647SEQLIST.txt, created on May 7, 2015, and having a size of 1,274 KB and is filed concurrently with the specification. The sequence listing contained in this ASCII formatted document is part of the specification and is herein incorporated by reference in its entirety.

### FIELD OF THE INVENTION

[0003] The invention is drawn to compositions and methods for controlling gene expression involved in plant growth and development.

### BACKGROUND OF THE INVENTION

[0004] The ever-increasing world population and the dwindling supply of arable land available for agriculture fuels research towards developing plants with increased biomass and yield. Conventional means for crop and horticultural improvements utilize selective breeding techniques to identify plants having desirable characteristics. However, such selective breeding techniques have several drawbacks, namely that these techniques are typically labor intensive and result in plants that often contain heterogeneous genetic components that may not always result in the desirable trait being passed on from parent plants. Advances in molecular biology provide means to modify the germplasm of plants. Genetic engineering of plants entails the isolation and manipulation of genetic material (typically in the form of DNA or RNA) and the subsequent introduction of that genetic material into a plant. Such technology has the capacity to deliver crops or plants having various improved economic, agronomic or horticultural traits.

[0005] Traits of interest include plant biomass and yield. Yield is normally defined as the measurable produce of economic value from a crop. This may be defined in terms of quantity and/or quality. Yield is directly dependent on several factors, for example, the number and size of the organs, plant architecture (for example, the number of branches), seed production, leaf senescence and more. Root development, nutrient uptake, stress tolerance and early vigor may also be important factors in determining yield. Optimizing the abovementioned factors may therefore contribute to increasing crop yield.

[0006] An increase in seed yield is a particularly important trait since the seeds of many plants are important for human and animal consumption. Crops such as corn, rice, wheat, canola and soybean account for over half the total human caloric intake, whether through direct consumption of the seeds themselves or through consumption of meat products raised on processed seeds. They are also a source of sugars, oils and many kinds of metabolites used in industrial processes. Seeds contain an embryo (the source of new shoots and roots) and an endosperm (the source of nutrients for embryo growth during germination and during early growth of seedlings). The development of a seed involves many genes, and requires the transfer of metabolites from the roots, leaves and stems into the growing seed. The endosperm, in particular, assimilates the metabolic precursors of carbohydrates, oils and proteins and synthesizes them into storage macromolecules to fill out the grain. An increase in plant biomass is important for forage crops like alfalfa, silage corn and hay. Many genes are involved in plant growth and development. Therefore, methods are needed for modulating such genes.

### SUMMARY OF THE INVENTION

[0007] Compositions and methods for increasing plant growth for higher crop yield are provided. Compositions comprise transcription factors and enhancers. The transcription factors can be used to alter plant growth by modulating the expression level and/or expression pattern of one or more genes of interest in a plant. Transcription factors that regulate genes involved in plant growth can be modulated to increase plant growth, increase plant mass, and plant yield. Enhancer elements or cis-regulatory elements are provided that may be used to alter the expression of a downstream open reading frame, whether said open reading frame encodes a transcription factor or any other gene of interest. Such enhancer elements and transcription factors can be used alone or in combination.

[0008] The invention further comprises synthetic promoters and promoter elements. Such promoters are useful for expressing nucleotide sequences of interest. DNA constructs comprising the elements of the invention, plants, and plant parts transformed with such constructs are provided.

[0009] Embodiments of the invention include:

1. A method of improving plant growth by altering the expression of at least one nucleotide sequence encoding a transcription factor (TF) listed in Table 1, or a fragment or variant thereof.
2. The method of embodiment 1 wherein the at least one transcription factor is upregulated such that expression of the TF is increased relative to a control plant cell.
3. The method of embodiment 1 wherein the at least one transcription factor is downregulated such that expression of the TF is decreased relative to a control plant cell.
4. The method of embodiment 1, 2, or 3 wherein said altering is achieved by the stable insertion of at least one expression construct comprising a promoter that drives expression in a plant cell, operably linked to at least one nucleotide sequence encoding at least one transcription factor of Table 1, or a fragment or variant thereof.
5. The method of any one of embodiments 1-4, wherein said fragment or variant has at least 80% sequence identity to the TF, wherein said nucleotide sequence retains transcription factor activity.
6. The method of any one of embodiments 1-4, wherein said fragment or variant has at least 90% sequence identity to the TF, wherein said nucleotide sequence retains transcription factor activity.
7. The method of any one of embodiments 1-4, wherein said fragment or variant has at least 95% sequence identity to the TF, wherein said nucleotide sequence retains transcription factor activity.
8. The method of any one of embodiments 1-3, wherein said altering is achieved by stable insertion of a DNA construct comprising at least one promoter that drives expression in a plant cell, operably linked to one or more amiRNA cassettes designed to target at least one transcription factor of Table 1.
9. The method of any one of embodiments 1-3 wherein said altering is achieved by stable insertion of a transformation construct comprising at least one promoter that is operable in a plant cell, operably linked to at least one RNAi cassettes designed to target at least one transcription factor of Table 1.
10. The method of any one of embodiments 1-3 wherein said altering is achieved by transforming a plant species of interest with a self-replicating transformation construct derived from a plant virus and comprising at least one promoter that drives expression in a plant cell, operably linked to at least one open reading frame encoding a transcription factor of Table 1.
11. The method of any one of embodiments 1-3 wherein said altering is achieved by transforming a plant species of interest with a self-replicating transformation construct derived from a plant virus and comprising at least one promoter that is operable in a plant cell, operably linked to one or more amiRNA cassettes designed to target a transcription factor of Table 1.
12. The method of any one of embodiments 1-3 wherein said altering is achieved by transforming a plant species of interest with a self-replicating transformation construct derived from a plant virus and comprising at least one promoter that drives expression in a plant cell, operably linked to at least one RNAi cassettes designed to target a transcription factor of Table 1.
13. The method of any one of embodiments 1-3 wherein said altering is achieved by inserting at least one cis-regulatory element into the genome of a plant cell, at a location such that the cis-regulatory elements alters the expression level and/or expression profile of a TF of Table 1, wherein said at least one cis-regulatory element comprises a nucleotide sequence having at least 90% sequence identity to the elements set forth in SEQ ID NOs: 475-536 and 543.
14. The method of embodiment 13, wherein said at least one cis-regulatory element comprises the nucleotide sequence set forth in SEQ ID NOs: 475-536 and 543.
15. The method of any one of embodiments 8-14 wherein the promoter is a constitutive promoter.
16. The method of any one of embodiments 8-14 wherein the promoter is a non-constitutive promoter.
17. The method of embodiment 16 wherein the promoter is a developmentally-regulated promoter.
18. The method of embodiment 16 wherein the promoter is a circadian-regulated or diurnally-regulated promoter.
19. The method of embodiment 16 wherein the promoter is a tissue-specific promoter.
20. The method of embodiment 16 wherein the promoter is an inducible promoter.
21. The method of embodiment 16 wherein the promoter is a light-regulated promoter.
22. A synthetic promoter operable in a plant cell comprising at least one cis-regulatory element selected from the elements set forth in SEQ ID NOs: 475-536 and 543 operably linked to at least one core promoter element that is operable in a plant cell.
23. The synthetic promoter of embodiment 22 that comprises SEQ ID NO: 1 or a sequence with at least 80% homology to SEQ ID NO: 1
24. A method of altering the expression of at least one gene of interest in a plant cell by inserting into the genome of a plant cell a construct comprising the synthetic promoter of embodiment 22 operably linked to said at least one gene.
25. A method of altering the expression of at least one gene of interest in a plant cell comprising inserting into the genome of a plant cell a construct comprising the synthetic promoter of embodiment 22 operably linked to an amiRNA cassette designed to target the at least one gene of interest.
26. A method of altering the expression of one or more genes of interest in a plant cell by inserting into the genome of a plant cell a construct comprising the synthetic promoter of embodiment 22 operably linked to an RNAi cassette designed to target the at least one gene of interest.
27. A method of altering the expression of at least one gene of interest in a plant cell comprising inserting at least one cis-regulatory element set forth in SEQ ID NOs: 475-536 and 543 into a plant genome at a location proximal to said at least one gene to alter the expression of said at least one gene of interest.
28. The method of embodiment 27 wherein at least one cis-regulatory element is inserted upstream of a core promoter element of a gene of interest and increases expression of said gene of interest.
29. The method of embodiment 27 wherein at least one cis-regulatory element is inserted upstream of a core promoter element of a gene of interest and alters the expression profile of said gene of interest.
30. The method of any one of embodiments 1-21 and 26-29, wherein the plant of interest is a monocotyledonous plant.
31. The method of any one of embodiments 1-21 and 26-29, wherein the plant of interest is a dicotyledonous plant.
32. The method of any one of embodiments 22-25 wherein the synthetic promoter comprises the sequence of SEQ ID NO: 1 or a sequence with at least 80% homology to SEQ ID NO: 1.
33. An isolated polynucleotide or a recombinant DNA comprising a nucleotide sequence encoding a polypeptide having at least 90% identity to the amino acid sequences of the TFs set forth in Table 1.
34. The isolated polynucleotide or recombinant DNA of embodiment 33, wherein said polypeptide has at least 95% identity.
35. The method of any one of embodiments 1-3, wherein said altering is achieved by the expression of a gene encoding a dCas9 protein fused to a domain for transcriptional regulation.
36. A synthetic promoter operable in a plant cell comprising at least one of the cis-regulatory elements set forth in SEQ IDs No. 475-536 and 543 operably linked to at least one core promoter element operable in a plant cell.
37. The synthetic promoter of embodiment 36, wherein said promoter comprises the sequence set forth in SEQ ID NO: 1.
38. An expression construct comprising a promoter that drives expression in a plant operably linked to a transcription factor (TF), wherein said nucleotide sequence is selected from sequences having at least 95% identity to the sequences set forth in SEQ ID NOs: 3, 5, 7, 9, 11, 13, 15, 17, 19, 21, 23, 25, 27, 29, 31, 33, 35, 37, 39, 41, 43, 45, 47, 49, 51, 53, 55, 57, 59, 61, 63, 65, 67, 69, 71, 73, 75, 77, 79, 81, 83, 85, 87, 89, 91, 93, 95, 97, 99, 101, 103, 105, 107, 109, 111, 113, 115, 117, 119, 121, 123, 125, 127, 129, 131, 133, 135, 137, 139, 141, 143, 145, 147, 149, 151, 153, 155, 157, 159, 161, 163, 165, 167, 169, 171, 173, 175, 177, 179, 181, 183, 185, 187, 189, 191, 193, 195, 197, 199, 201, 203, 205, 207, 209, 211, 213, 215, 217, 219, 221, 223, 225, 227, 229, 231, 233, 235, 237 and SEQ ID NOS: 239, 241, 243, 245, 247, 249, 251, 253, 255, 257, 259, 261, 263, 265, 267, 269, 271, 273, 275, 277, 279, 281, 283, 285, 287, 289, 291, 293, 295, 297, 299, 301, 303, 305, 307, 309, 311, 313, 315, 317, 319, 321, 323, 325, 327, 329, 331, 333, 335, 337, 339, 341, 343, 345, 347, 349, 351, 353, 355, 357, 359, 361, 363, 365, 367, 369, 371, 373, 375, 377, 379, 381, 383, 385, 387, 389, 391, 393, 395, 397, 399, 401, 403, 405, 407, 409, 411, 413, 415, 417, 419, 421, 423, 425, 427, 429, 431, 433, 435, 437, 439, 441, 443, 445, 447, 449, 451, 453, 455, 457, 459, 461, 463, 465, 467, 469, 471, and 473.
39. A plant transformed with the expression construct of embodiment 38.
40. Transformed seed of the plant of embodiment 39.
41. The plant of embodiment 39, wherein said plant is a monocotyledonous plant.
42. The plant of embodiment 39, wherein said plant is a dicotyledonous plant.
43. The expression construct of embodiment 38, further comprising at least one nucleotide sequence of interest.
44. An expression construct comprising a synthetic promoter operable in a plant cell comprising at least one of the cis-regulatory elements set forth in SEQ IDs No. 475-536 and 543 operably linked to at least one core promoter element operable in a plant, wherein said synthetic promoter is operably linked to a nucleotide sequence.
45. The expression construct of embodiment 44, wherein said nucleotide sequence is a coding sequence.
46. A plant transformed with the expression construct of embodiment 44.
47. Transformed seed of the plant of embodiment 46.
48. The plant of embodiment 46, wherein said plant is a monocotyledonous plant.
49. The plant of embodiment 46, wherein said plant is a dicotyledonous plant.

### FIGURE LEGEND

[0010] FIG. 1: Candidate cis-regulatory elements for mesophyll and bundle sheath-specific expression. Putative cis-regulatory elements, “RGCGR” and “WAAAG”, were discovered by ELEMENT and CoGe. The alignment is generated based on sequences from sorghum (Sb03g029170 (SEQ ID NO: 544) and Sb01g040720 (SEQ ID NO: 550)), maize (GRMZM2G121878 (SEQ ID NO: 545) and (GRMZM2G001696 (SEQ ID NO: 549)), rice (Os01g45274 (SEQ ID NO: 547) and LOC.Os03g15050 (SEQ ID NO: 552)) and S. italica (Si003882m (SEQ ID NO: 546) and (Si034404 m.g (SEQ ID NO: 551)) by Multialin (Corpet 1988 Nucleic Acids Res 16: 10881-10890). Boxes highlight the putative elements; box 3 indicates a putative element that is found only in sorghum. The consensus sequence for the alignment in the top panel is set forth in SEQ ID NO: 548, and the consensus sequence for the alignment in the bottom panel is set forth in SEQ ID NO: 553).

### DETAILED DESCRIPTION OF THE INVENTION

[0011] Compositions and methods for the manipulation of photosynthesis through altering the expression of transcription factors (TFs) that regulate genes encoding proteins involved in photosynthesis is provided. The present invention describes methods for identifying a number of transcription factors for the regulation of photosynthetic processes. Without being bound by theory, by altering the expression level and/or profile of one or more of these transcription factors in a plant of interest, photosynthetic metabolism is optimized. Such optimization of photosynthesis provides for increased plant growth and elevated yield in crop plants. The invention provides novel TFs that can be used to transform a plant of interest and can be used in plant breeding programs aimed at developing higher-yielding crops. Recombinant nucleotide sequences encoding the transcription factors are provided. Such methods and elements are disclosed in Wang et al., 2014, Nat. Biotechnol. 32: 1158-1165, which is herein incorporated by reference in its entirety.

[0012] A “recombinant polynucleotide” comprises a combination of two or more chemically linked nucleic acid segments which are not found directly joined in nature. By “directly joined” is intended the two nucleic acid segments are immediately adjacent and joined to one another by a chemical linkage. In specific embodiments, the recombinant polynucleotide comprises a polynucleotide of interest or active variant or fragment thereof such that an additional chemically linked nucleic acid segment is located either 5′, 3′ or internal to the polynucleotide of interest. Alternatively, the chemically-linked nucleic acid segment of the recombinant polynucleotide can be formed by deletion of a sequence. The additional chemically linked nucleic acid segment or the sequence deleted to join the linked nucleic acid segments can be of any length, including for example, 1, 2, 3, 4, 5, 6, 7, 8, 9, 10, 15, 20 or greater nucleotides. Various methods for making such recombinant polynucleotides are disclosed herein, including, for example, by chemical synthesis or by the manipulation of isolated segments of polynucleotides by genetic engineering techniques. In specific embodiments, the recombinant polynucleotide can comprise a recombinant DNA sequence or a recombinant RNA sequence. A “fragment of a recombinant polynucleotide” comprises at least one of a combination of two or more chemically linked amino acid segments which are not found directly joined in nature.

[0013] A “recombinant polynucleotide construct” comprises two or more operably linked nucleic acid segments which are not found operably linked in nature. Non-limiting examples of recombinant polynucleotide constructs include a polynucleotide of interest or active variant or fragment thereof operably linked to heterologous sequences which aid in the expression, autologous replication, and/or genomic insertion of the sequence of interest. Such heterologous and operably linked sequences include, for example, promoters, termination sequences, enhancers, etc, or any component of an expression cassette; a plasmid, cosmid, virus, autonomously replicating sequence, phage, or linear or circular single-stranded or double-stranded DNA or RNA nucleotide sequence; and/or sequences that encode heterologous polypeptides.

[0014] A “recombinant polypeptide” comprises a combination of two or more chemically linked amino acid segments which are not found directly joined in nature. In specific embodiments, the recombinant polypeptide comprises an additional chemically linked amino acid segment that is located either at the N-terminal, C-terminal or internal to the recombinant polypeptide. Alternatively, the chemically-linked amino acid segment of the recombinant polypeptide can be formed by deletion of at least one amino acid. The additional chemically linked amino acid segment or the deleted chemically linked amino acid segment can be of any length, including for example, 1, 2, 3, 4, 5, 6, 7, 8, 9, 10, 15, 20 or amino acids.

[0015] By “altering” or “modulating” the expression level of a TF is intended that the expression is upregulated or downregulated. It is recognized that in some instances, plant growth and yield are increased by increasing the expression levels of one or more of the TFs of the invention, i.e. upregulating expression. Likewise, in some instances, plant growth and yield may be increased by decreasing the expression levels of one or more of the TFs of the invention, i.e. downregulating expression. Thus, the invention encompasses the upregulation or downregulation of one or more of the TFs of the invention. Further, the methods include the upregulation of at least one TF and the downregulation of at least one TF in a plant of interest. By modulating the concentration and/or activity of at least one of the TFs of the invention in a transgenic plant is intended that the concentration and/or activity is increased or decreased by at least 1%, 5%, 10%, 20%, 30%, 40%, 50%, 60%, 70%, 80%, or 90% relative to a native control plant, plant part, or cell which did not have the sequence of the invention introduced. It is recognized that the expression levels of the TFs can be controlled by the choice of promoter or the use of enhancers. For example, if a 30% increase is desired, a promoter will be selected to provide the appropriate expression level. The expression level of the TF may be measured directly, for example, by assaying for the level of the TF in the plant. “Transcription factor activity” refers to the ability of a transcription factor to bind to specific DNA sequences, thereby controlling the rate of transcription of genetic information from DNA to messenger RNA.

[0016] In order to successfully manipulate the expression level and/or expression profile of candidate TFs, genetic tools, including promoters and enhancer elements, may be used. The present invention describes a number of novel enhancer elements and cis-regulatory elements that were identified through bioinformatic analyses of transcriptomic data. At least one of the enhancer elements may be used to increase the expression of a downstream gene of interest. Alternatively, at least one of the enhancer elements may be combined with a promoter such as a minimal promoter element to create a novel promoter with the desired expression profile.

[0017] In many C4 plants, the bundle sheath and mesophyll cells perform very different functions. In these C4 plants, it may be desirable to express a gene or genes of interest in a cell-specific or cell-preferred manner, so that a gene product accumulates primarily in mesophyll or bundle sheath cells. This may be accomplished by transforming a plant of interest with one or more of the cis-regulatory elements described herein. Furthermore, these cis-regulatory elements may be used in C3, C4, or CAM plants to enhance the expression of a gene or genes of interest, whether in a cell-specific or non-cell-specific manner. Still further, these cis-regulatory elements may be used in the design of novel synthetic promoters for the expression of genes of interest. Further, these cis-regulatory elements may be used to alter the expression of a native gene within a plant genome through, e.g., genome-editing approaches.

[0018] The compositions of the invention are used to alter expression of genes of interest in a plant, particularly genes involved in photosynthesis. Therefore, the expression of a TF may be modulated as compared to a control plant. A “subject plant or plant cell” is one in which genetic alteration, such as transformation, has been effected as to a gene of interest, or is a plant or plant cell which is descended from a plant or cell so altered and which comprises the alteration. A “control” or “control plant” or “control plant cell” provides a reference point for measuring changes in phenotype of the subject plant or plant cell. Thus, the expression levels are higher or lower than those in the control plant depending on the methods of the invention.

[0019] A control plant or plant cell may comprise, for example: (a) a wild-type plant or cell, i.e., of the same genotype as the starting material for the genetic alteration which resulted in the subject plant or cell; (b) a plant or plant cell of the same genotype as the starting material but which has been transformed with a null construct (i.e. with a construct which has no known effect on the trait of interest, such as a construct comprising a marker gene); (c) a plant or plant cell which is a non-transformed segregant among progeny of a subject plant or plant cell; (d) a plant or plant cell genetically identical to the subject plant or plant cell but which is not exposed to conditions or stimuli that would induce expression of the gene of interest; or (e) the subject plant or plant cell itself, under conditions in which the gene of interest is not expressed.

[0020] While the invention is described in terms of transformed plants, it is recognized that transformed organisms of the invention also include plant cells, plant protoplasts, plant cell tissue cultures from which plants can be regenerated, plant calli, plant clumps, and plant cells that are intact in plants or parts of plants such as embryos, pollen, ovules, seeds, leaves, flowers, branches, fruit, kernels, ears, cobs, husks, stalks, roots, root tips, anthers, and the like. Grain is intended to mean the mature seed produced by commercial growers for purposes other than growing or reproducing the species. Progeny, variants, and mutants of the regenerated plants are also included within the scope of the invention, provided that these parts comprise the introduced polynucleotides.

[0021] The enhancers or cis-regulatory elements of the invention can be used to enhance expression of any gene of interest. In one embodiment, the elements can be used with promoters or promoter elements to modulate expression in a plant of interest. Eukaryotic promoters are complex and are comprised of components that include a TATA box consensus sequence at about 35 base pairs 5′ relative to the transcription start site or cap site which is defined as +1. The TATA motif is the site where the TATA-binding-protein (TBP) as part of a complex of several polypeptides (TFIID complex) binds and productively interacts (directly or indirectly) with factors bound to other sequence elements of the promoter. This TFIID complex in turn recruits the RNA polymerase II complex to be positioned for the start of transcription generally 25 to 30 base pairs downstream of the TATA element and promotes elongation thus producing RNA molecules. The sequences around the start of transcription (designated INR) of some polI genes seem to provide an alternate binding site for factors that also recruit members of the TFIID complex and thus “activate” transcription. These INR sequences are particularly relevant in promoters that lack functional TATA elements providing the core promoter binding sites for eventual transcription. It has been proposed that promoters containing both a functional TATA and INR motif are the most efficient in transcriptional activity. (Zenzie-Gregory et al. (1992) J. Biol. Chem. 267:2823-2830). See, also, U.S. Pat. No. 6,072,050, herein incorporated by reference. A “core promoter” or “core promoter element” refers to a minimal region of a regulatory polynucleotide required to properly initiate transcription. A core promoter typically contains the transcription start site (TSS), a binding site for RNA polymerase, and general transcription factor binding sites. Core promoters can include promoters produced through the manipulation of known core promoters to produce artificial, chimeric, or hybrid promoters, and can be used in combination with other regulatory elements, such as cis-elements, enhancers, or introns, for example, by adding a heterologous regulatory element to an active core promoter with its own partial or complete regulatory elements.

[0022] The invention encompasses isolated or substantially purified transcription factor or enhancer polynucleotide or amino acid compositions. An “isolated” or “purified” polynucleotide or protein, or biologically active portion thereof, is substantially or essentially free from components that normally accompany or interact with the polynucleotide or protein as found in its naturally occurring environment. Thus, an isolated or purified polynucleotide or protein is substantially free of other cellular material, or culture medium when produced by recombinant techniques, or substantially free of chemical precursors or other chemicals when chemically synthesized. Optimally, an “isolated” polynucleotide is free of sequences (optimally protein encoding sequences) that naturally flank the polynucleotide (i.e., sequences located at the 5′ and 3′ ends of the polynucleotide) in the genomic DNA of the organism from which the polynucleotide is derived.

[0023] Fragments and variants of the disclosed polynucleotides and amino acid sequences encoded thereby are also encompassed by the present invention. By “fragment” is intended a portion of the polynucleotide or a portion of the amino acid sequence. “Variants” is intended to mean substantially similar sequences. For polynucleotides, a variant comprises a polynucleotide having deletions (i.e., truncations) at the 5′ and/or 3′ end; deletion and/or addition of one or more nucleotides at one or more internal sites in the native polynucleotide; and/or substitution of one or more nucleotides at one or more sites in the native polynucleotide. As used herein, a “native” polynucleotide or polypeptide comprises a naturally occurring nucleotide sequence or amino acid sequence, respectively. Generally, variants of a particular polynucleotide of the invention will have at least about 75%, 80%, 85%, 90%, 91%, 92%, 93%, 94%, 95%, 96%, 97%, 98%, 99% or more sequence identity to that particular polynucleotide as determined by sequence alignment programs and parameters as described elsewhere herein. Biologically active promoter polynucleotides can have at least about 75%, 80%, 85%, 90%, 91%, 92%, 93%, 94%, 95%, 96%, 97%, 98%, 99% or more sequence identity to the native promoter sequence and retain the ability to initiate transcription (i.e., promoter activity).

[0024] “Variant” amino acid or protein is intended to mean an amino acid or protein derived from the native amino acid or protein by deletion (so-called truncation) of one or more amino acids at the N-terminal and/or C-terminal end of the native protein; deletion and/or addition of one or more amino acids at one or more internal sites in the native protein; or substitution of one or more amino acids at one or more sites in the native protein. Variant proteins encompassed by the present invention are biologically active, that is they continue to possess the desired biological activity of the native TF or enhancer. Biologically active variants of a native TF or enhancer sequence of the invention will have at least about 80%, 85%, 90%, 91%, 92%, 93%, 94%, 95%, 96%, 97%, 98%, 99% or more sequence identity to the amino acid sequence for the native sequence as determined by sequence alignment programs and parameters described herein. A biologically active variant of a protein of the invention may differ from that protein by as few as 1-15 amino acid residues, as few as 1-10, such as 6-10, as few as 5, as few as 4, 3, 2, or even 1 amino acid residue.

[0025] As indicated, the TFs of the invention can be upregulated or downregulated in a plant of interest. It may be desirable to upregulate at least one TF while simultaneously downregulating at least one different TF. Methods for increasing the expression or upregulating a TF are known in the art and any can be used in the methods of the invention. In one embodiment, upregulation can be achieved by transforming a plant with an expression cassette comprising a promoter operably linked to at least one TF of the invention. Many techniques for upregulating the expression are well known to one of skill in the art, including, but not limited to, designed transcription factors containing a transcriptional activation domain fused to a zinc finger nuclease (Li et al. (2013) Plant Biotechnol J 11: 671-680); dCas9-based transcription factors (Piatek et al. (2015) Plant Biotechnol J 13: 578-589); designed transcription factors containing one or more transcriptional activation domains fused to a DNA-binding protein (Petolino and Davies (2013) Plant Sci 201-202: 128-136); delivery of a virally-derived vector to a plant (Gleba et al. (2014) Curr Top Microbiol Immunol 375: 155-192); each of which is herein incorporated by reference; and other methods or combinations of the above methods known to those of skill in the art.

[0026] Downregulation or reduction of the activity of a TF (also known as gene silencing or gene suppression) is also encompassed by the methods of the invention. Many techniques for gene silencing are well known to one of skill in the art, including, but not limited to, antisense technology (see, e.g., Sheehy et al. (1988) Proc. Natl. Acad. Sci. USA 85:8805-8809; and U.S. Pat. Nos. 5,107,065; 5,453,566; and 5,759,829); cosuppression (e.g., Taylor (1997) Plant Cell 9:1245; Jorgensen (1990) Trends Biotech. 8(12):340-344; Flavell (1994) Proc. Natl. Acad. Sci. USA 91:3490-3496; Finnegan et al. (1994) Bio/Technology 12:883-888; and Neuhuber et al. (1994) Mol. Gen. Genet. 244:230-241); RNA interference (Napoli et al. (1990) Plant Cell 2:279-289; U.S. Pat. No. 5,034,323; Sharp (1999) Genes Dev. 13:139-141; Zamore et al. (2000) Cell 101:25-33; and Montgomery et al. (1998) Proc. Natl. Acad. Sci. USA 95:15502-15507), virus-induced gene silencing (Burton et al. (2000) Plant Cell 12:691-705; and Baulcombe (1999) Curr. Op. Plant Bio. 2:109-113); target-RNA-specific ribozymes (Haseloff et al. (1988) Nature 334: 585-591); hairpin structures (Smith et al. (2000) Nature 407:319-320; WO 99/53050; WO 02/00904; WO 98/53083; Chuang and Meyerowitz (2000) Proc. Natl. Acad. Sci. USA 97:4985-4990; Stoutjesdijk et al. (2002) Plant Physiol. 129:1723-1731; Waterhouse and Helliwell (2003) Nat. Rev. Genet. 4:29-38; Pandolfini et al. BMC Biotechnology 3:7, U.S. Patent Publication No. 20030175965; Panstruga et al. (2003) Mol. Biol. Rep. 30:135-140; Wesley et al. (2001) Plant J. 27:581-590; Wang and Waterhouse (2001) Curr. Opin. Plant Biol. 5:146-150; U.S. Patent Publication No. 20030180945; and, WO 02/00904, all of which are herein incorporated by reference); ribozymes (Steinecke et al. (1992) EMBO J. 11:1525; and Perriman et al. (1993) Antisense Res. Dev. 3:253); oligonucleotide-mediated targeted modification (e.g., WO 03/076574 and WO 99/25853); Zn-finger targeted molecules (e.g., WO 01/52620; WO 03/048345; and WO 00/42219); transposon tagging (Maes et al. (1999) Trends Plant Sci. 4:90-96; Dharmapuri and Sonti (1999) FEMS Microbiol. Lett. 179:53-59; Meissner et al. (2000) Plant J. 22:265-274; Phogat et al. (2000) J. Biosci. 25:57-63; Walbot (2000) Curr. Opin. Plant Biol. 2:103-107; Gai et al. (2000) Nucleic Acids Res. 28:94-96; Fitzmaurice et al. (1999) Genetics 153:1919-1928; Bensen et al. (1995) Plant Cell 7:75-84; Mena et al. (1996) Science 274:1537-1540; and U.S. Pat. No. 5,962,764); dCas9-based transcription factors (Piatek et al. (2015) Plant Biotechnol J 13: 578-589); each of which is herein incorporated by reference; and other methods or combinations of the above methods known to those of skill in the art.

[0027] It is recognized that with the polynucleotides of the invention, antisense constructions, complementary to at least a portion of the messenger RNA (mRNA) for the TF sequences can be constructed. Antisense nucleotides are constructed to hybridize with the corresponding mRNA. Modifications of the antisense sequences may be made as long as the sequences hybridize to and interfere with expression of the corresponding mRNA. In this manner, antisense constructions having 70%, optimally 80%, more optimally 85% or greater sequence identity to the corresponding sequences to be silenced may be used. Furthermore, portions of the antisense nucleotides may be used to disrupt the expression of the target gene encoding a TF.

[0028] The polynucleotides of the present invention may also be used in the sense orientation to suppress the expression of endogenous genes in plants. The methods generally involve transforming plants with a DNA construct comprising a promoter that drives expression in a plant operably linked to at least a portion of a polynucleotide that corresponds to the transcript of the endogenous gene. Typically, such a nucleotide sequence has substantial sequence identity to the sequence of the transcript of the endogenous gene, optimally greater than about 65% sequence identity, more optimally greater than about 85% sequence identity, most optimally greater than about 95% sequence identity. See U.S. Pat. Nos. 5,283,184 and 5,034,323; herein incorporated by reference. Such methods may be used to reduce the expression of at least one TF.

[0029] The polynucleotides of the invention can be used to isolate corresponding sequences from other plants. In this manner, methods such as PCR, hybridization, and the like can be used to identify such sequences based on their sequence homology to the sequences set forth herein. Sequences isolated based on their sequence identity to the entire sequences set forth herein or to variants and fragments thereof are encompassed by the present invention. Such sequences include sequences that are orthologs of the disclosed sequences. “Orthologs” is intended to mean genes derived from a common ancestral gene and which are found in different species as a result of speciation. Genes found in different species are considered orthologs when their nucleotide sequences and/or their encoded protein sequences share at least 75%, 80%, 85%, 90%, 91%, 92%, 93%, 94%, 95%, 96%, 97%, 98%, 99%, or greater sequence identity. Functions of orthologs are often highly conserved among species. Thus, isolated polynucleotides that transcription activation or enhancer activities and which hybridize under stringent conditions to the sequences disclosed herein, or to variants or fragments thereof, are encompassed by the present invention.

[0030] Variant sequences can be isolated by PCR as well as hybridization. Methods for designing PCR primers and PCR cloning are generally known in the art and are disclosed in Sambrook et al. (1989) Molecular Cloning: A Laboratory Manual (2d ed., Cold Spring Harbor Laboratory Press, Plainview, N.Y.). See also Innis et al., eds. (1990) PCR Protocols: A Guide to Methods and Applications (Academic Press, New York); Innis and Gelfand, eds. (1995) PCR Strategies (Academic Press, New York); and Innis and Gelfand, eds. (1999) PCR Methods Manual (Academic Press, New York).

[0031] In hybridization techniques, all or part of a known polynucleotide is used as a probe that selectively hybridizes to other corresponding polynucleotides present in a population of cloned genomic DNA fragments from a chosen organism. Methods for hybridization as well as hybridization conditions are generally known in the art and are disclosed in Sambrook et al. (1989) Molecular Cloning: A Laboratory Manual (2d ed., Cold Spring Harbor Laboratory Press, Plainview, N.Y.).

[0032] Variant sequences may also be identified by analysis of existing databases of sequenced genomes. In this manner, corresponding TF or enhancer sequences can be identified and used in the methods of the invention.

[0033] Methods of alignment of sequences for comparison are well known in the art. Thus, the determination of percent sequence identity between any two sequences can be accomplished using a mathematical algorithm. Non-limiting examples of such mathematical algorithms are the algorithm of Myers and Miller (1988) CABIOS 4:11-17; the local alignment algorithm of Smith et al. (1981) Adv. Appl. Math. 2:482; the global alignment algorithm of Needleman and Wunsch (1970) J. Mol. Biol. 48:443-453; the search-for-local alignment method of Pearson and Lipman (1988) Proc. Natl. Acad. Sci. 85:2444-2448; the algorithm of Karlin and Altschul (1990) Proc. Natl. Acad. Sci. USA 872264, modified as in Karlin and Altschul (1993) Proc. Natl. Acad. Sci. USA 90:5873-5877.

[0034] Computer implementations of these mathematical algorithms can be utilized for comparison of sequences to determine sequence identity. Such implementations include, but are not limited to: CLUSTAL in the PC/Gene program (available from Intelligenetics, Mountain View, Calif.); the ALIGN program (Version 2.0) and GAP, BESTFIT, BLAST, FASTA, and TFASTA in the GCG Wisconsin Genetics Software Package, Version 10 (available from Accelrys Inc., 9685 Scranton Road, San Diego, Calif., USA). Alignments using these programs can be performed using the default parameters. The CLUSTAL program is well described by Higgins et al. (1988) Gene 73:237-244 (1988); Higgins et al. (1989) CABIOS 5:151-153; Corpet et al. (1988) Nucleic Acids Res. 16:10881-90; Huang et al. (1992) CABIOS 8:155-65; and Pearson et al. (1994) Meth. Mol. Biol. 24:307-331. The ALIGN program is based on the algorithm of Myers and Miller (1988) supra. A PAM120 weight residue table, a gap length penalty of 12, and a gap penalty of 4 can be used with the ALIGN program when comparing amino acid sequences. The BLAST programs of Altschul et al. (1990) J. Mol. Biol. 215:403 are based on the algorithm of Karlin and Altschul (1990) supra. BLAST nucleotide searches can be performed with the BLASTN program, score=100, wordlength=12, to obtain nucleotide sequences homologous to a nucleotide sequence encoding a protein of the invention. BLAST protein searches can be performed with the BLASTX program, score=50, wordlength=3, to obtain amino acid sequences homologous to a protein or polypeptide of the invention. To obtain gapped alignments for comparison purposes, Gapped BLAST (in BLAST 2.0) can be utilized as described in Altschul et al. (1997) Nucleic Acids Res. 25:3389. Alternatively, PSI-BLAST (in BLAST 2.0) can be used to perform an iterated search that detects distant relationships between molecules. See Altschul et al. (1997) supra. When utilizing BLAST, Gapped BLAST, PSI-BLAST, the default parameters of the respective programs (e.g., BLASTN for nucleotide sequences, BLASTX for proteins) can be used. See, the world wide web at ncbi.nlm.nih.gov. Alignment may also be performed manually by inspection.

[0035] The polynucleotides of the invention can be provided in expression cassettes for expression in a plant of interest. The cassette will include 5′ and 3′ regulatory sequences operably linked to a TF polynucleotide of the invention. “Operably linked” is intended to mean a functional linkage between two or more elements. The cassette may additionally contain at least one additional gene to be co-transformed into the organism. Alternatively, the additional gene(s) can be provided on multiple expression cassettes. Such an expression cassette is provided with a plurality of restriction sites and/or recombination sites for insertion of the TF polynucleotide to be under the transcriptional regulation of the regulatory regions. The expression cassette may additionally contain selectable marker genes.

[0036] The expression cassette will include in the 5′-3′ direction of transcription, a transcriptional and translational initiation region (i.e., a promoter), a TF polynucleotide of the invention, and a transcriptional and translational termination region (i.e., termination region) functional in plants.

[0037] A number of promoters may be used in the practice of the invention. Constitutive promoters include the CaMV 35S promoter (Odell et al. (1985) Nature 313:810-812); rice actin (McElroy et al. (1990) Plant Cell 2:163-171); ubiquitin (Christensen et al. (1989) Plant Mol. Biol. 12:619-632 and Christensen et al. (1992) Plant Mol. Biol. 18:675-689); pEMU (Last et al. (1991) Theor. Appl. Genet. 81:581-588); MAS (Velten et al. (1984) EMBO J. 3:2723-2730); ALS promoter (U.S. Pat. No. 5,659,026), and the like, all of which are herein incorporated by reference.

[0038] Tissue-preferred promoters include Yamamoto et al. (1997) Plant J. 12(2):255-265; Kawamata et al. (1997) Plant Cell Physiol. 38(7):792-803; Hansen et al. (1997) Mol. Gen Genet. 254(3):337-343; Russell et al. (1997) Transgenic Res. 6(2):157-168; Rinehart et al. (1996) Plant Physiol. 112(3):1331-1341; Van Camp et al. (1996) Plant Physiol. 112(2):525-535; Canevascini et al. (1996) Plant Physiol. 112(2):513-524; Yamamoto et al. (1994) Plant Cell Physiol. 35(5):773-778; Lam (1994) Results Probl. Cell Differ. 20:181-196; Orozco et al. (1993) Plant Mol Biol. 23(6):1129-1138; Matsuoka et al. (1993) Proc Natl. Acad. Sci. USA 90(20):9586-9590; and Guevara-Garcia et al. (1993) Plant J. 4(3):495-505. Leaf-preferred promoters are also known in the art. See, for example, Yamamoto et al. (1997) Plant J. 12(2):255-265; Kwon et al. (1994) Plant Physiol. 105:357-67; Yamamoto et al. (1994) Plant Cell Physiol. 35(5):773-778; Gotor et al. (1993) Plant J. 3:509-18; Orozco et al. (1993) Plant Mol. Biol. 23(6):1129-1138; and Matsuoka et al. (1993) Proc. Natl. Acad. Sci. USA 90(20):9586-9590.

[0039] It is recognized that a specific, non-constitutive expression profile may provide an improved plant phenotype relative to constitutive expression of a gene or genes of interest. For instance, many plant genes are regulated by light conditions, the application of particular stresses, the circadian cycle, or the stage of a plant's development. These expression profiles may be highly important for the function of the gene or gene product in planta. One strategy that may be used to provide a desired expression profile is the use of synthetic promoters containing cis-regulatory elements that drive the desired expression levels at the desired time and place in the plant. A number of researchers have identified cis-regulatory elements that can be used to alter gene expression in planta (Vandepoele et al. (2009) Plant Physiol 150: 535-546; Rushton et al. (2002) Plant Cell 14: 749-762). The use of cis-regulatory elements to alter promoter expression profiles has also been reviewed (Venter (2007) Trends Plant Sci. 12: 118-124). The rapid development of new technologies for transcriptomic studies and of new methods to analyze such datasets has enabled the discovery of new cis-regulatory elements. It is well understood that microarray datasets used previously did not have the same resolution as transcriptomic data generated using RNA-Seq. The use of these newer technologies to generate transcriptomic data and the development of new software algorithms for the analysis of transcriptomic data has enabled the discovery of novel cis-regulatory elements including those described herein.

[0040] Plant terminators are known in the art and include those available from the Ti-plasmid of A. tumefaciens, such as the octopine synthase and nopaline synthase termination regions. See also Guerineau et al. (1991) Mol. Gen. Genet. 262:141-144; Proudfoot (1991) Cell 64:671-674; Sanfacon et al. (1991) Genes Dev. 5:141-149; Mogen et al. (1990) Plant Cell 2:1261-1272; Munroe et al. (1990) Gene 91:151-158; Ballas et al. (1989) Nucleic Acids Res. 17:7891-7903; and Joshi et al. (1987) Nucleic Acids Res. 15:9627-9639.

[0041] As indicated, the TF can be used in expression cassettes to transform plants of interest. Transformation protocols as well as protocols for introducing polypeptides or polynucleotide sequences into plants may vary depending on the type of plant or plant cell, i.e., monocot or dicot, targeted for transformation. Suitable methods of introducing polypeptides and polynucleotides into plant cells include microinjection (Crossway et al. (1986) Biotechniques 4:320-334), electroporation (Riggs et al. (1986) Proc. Natl. Acad. Sci. USA 83:5602 5606, Agrobacterium-mediated transformation (U.S. Pat. No. 5,563,055 and U.S. Pat. No. 5,981,840), direct gene transfer (Paszkowski et al. (1984) EMBO J. 3:2717-2722), and ballistic particle acceleration (see, for example, U.S. Pat. No. 4,945,050; U.S. Pat. No. 5,879,918; U.S. Pat. Nos. 5,886,244; and, 5,932,782; Tomes et al. (1995) in Plant Cell, Tissue, and Organ Culture: Fundamental Methods, ed. Gamborg and Phillips (Springer-Verlag, Berlin); McCabe et al. (1988) Biotechnology 6:923-926); and Lec1 transformation (WO 00/28058). Also see Weissinger et al. (1988) Ann. Rev. Genet. 22:421-477; Sanford et al. (1987) Particulate Science and Technology 5:27-37 (onion); Christou et al. (1988) Plant Physiol. 87:671-674 (soybean); McCabe et al. (1988) Bio/Technology 6:923-926 (soybean); Finer and McMullen (1991) In Vitro Cell Dev. Biol. 27P:175-182 (soybean); Singh et al. (1998) Theor. Appl. Genet. 96:319-324 (soybean); Datta et al. (1990) Biotechnology 8:736 740 (rice); Klein et al. (1988) Proc. Natl. Acad. Sci. USA 85:4305-4309 (maize); Klein et al. (1988) Biotechnology 6:559-563 (maize); U.S. Pat. Nos. 5,240,855; 5,322,783; and, 5,324,646; Klein et al. (1988) Plant Physiol. 91:440-444 (maize); Fromm et al. (1990) Biotechnology 8:833-839 (maize); Hooykaas-Van Slogteren et al. (1984) Nature (London) 311:763-764; U.S. Pat. No. 5,736,369 (cereals); Bytebier et al. (1987) Proc. Natl. Acad. Sci. USA 84:5345-5349 (Liliaceae); De Wet et al. (1985) in The Experimental Manipulation of Ovule Tissues, ed. Chapman et al. (Longman, N.Y.), pp. 197-209 (pollen); Kaeppler et al. (1990) Plant Cell Reports 9:415-418 and Kaeppler et al. (1992) Theor. Appl. Genet. 84:560-566 (whisker-mediated transformation); D'Halluin et al. (1992) Plant Cell 4:1495-1505 (electroporation); Li et al. (1993) Plant Cell Reports 12:250-255 and Christou and Ford (1995) Annals of Botany 75:407-413 (rice); Osjoda et al. (1996) Nature Biotechnology 14:745-750 (maize via Agrobacterium tumefaciens); all of which are herein incorporated by reference. “Stable transformation” or “stable insertion” is intended to mean that the nucleotide construct introduced into a plant integrates into the genome of the plant and is capable of being inherited by the progeny thereof.

[0042] The cells that have been transformed may be grown into plants in accordance with conventional ways. See, for example, McCormick et al. (1986) Plant Cell Reports 5:81-84. In this manner, the present invention provides transformed seed (also referred to as “transgenic seed”) having a polynucleotide of the invention, for example, an expression cassette of the invention, stably incorporated into their genome.

[0043] The present invention may be used for transformation of any plant species, including, but not limited to, monocots and dicots. Examples of plant species of interest include, but are not limited to, corn (Zea mays), Brassica sp. (e.g., B. napus, B. rapa, B. juncea), particularly those Brassica species useful as sources of seed oil, alfalfa (Medicago sativa), rice (Oryza sativa), rye (Secale cereale), sorghum (Sorghum bicolor, Sorghum vulgare), millet (e.g., pearl millet (Pennisetum glaucum), proso millet (Panicum miliaceum), foxtail millet (Setaria italica), finger millet (Eleusine coracana)), sunflower (Helianthus annuus), safflower (Carthamus tinctorius), wheat (Triticum aestivum), soybean (Glycine max), tobacco (Nicotiana tabacum), potato (Solanum tuberosum), peanuts (Arachis hypogaea), cotton (Gossypium barbadense, Gossypium hirsutum), sweet potato (Ipomoea batatas), cassava (Manihot esculenta), coffee (Coffea spp.), coconut (Cocos nucifera), pineapple (Ananas comosus), citrus trees (Citrus spp.), cocoa (Theobroma cacao), tea (Camellia sinensis), banana (Musa spp.), avocado (Persea americana), fig (Ficus casica), guava (Psidium guajava), mango (Mangifera indica), olive (Olea europaea), papaya (Carica papaya), cashew (Anacardium occidentale), macadamia (Macadamia integrifolia), almond (Prunus amygdalus), sugar beets (Beta vulgaris), sugarcane (Saccharum spp.), oats, barley, vegetables, ornamentals, and conifers.

[0044] The following examples are offered by way of illustration and not by way of limitation. All publications and patent applications mentioned in the specification are indicative of the level of those skilled in the art to which this invention pertains. All publications and patent applications are herein incorporated by reference to the same extent as if each individual publication or patent application was specifically and individually indicated to be incorporated by reference.

[0045] Although the foregoing invention has been described in some detail by way of illustration and example for purposes of clarity of understanding, it will be obvious that certain changes and modifications may be practiced within the scope of the appended claims.

### EXPERIMENTAL

### Example 1

### Discovery of 118 Transcription Factors Proposed to Regulate C4 Photosynthesis

[0046] Rice and maize leaves were segmented along a developmental gradient, and RNA was extracted from each leaf segment. This RNA was sequenced using RNA-Seq to produce transcriptomic data along the developing leaf gradient. This transcriptomic data was organized into thirty different clusters according to the expression profile for each gene. The expression profiles of the 2,517 maize transcription factors annotated in the Grassius database (on the world-wide web at www.grassius.org) were then analyzed.

[0047] The following criteria were applied to discover the transcription factors that are likely to be involved in regulating C4 photosynthesis:

[0048] 1. The TFs are expressed above background noise in the leaf

[0049] 2. There is a one to one correspondence of orthologous genes in rice (based on synteny and sequence similarity)

[0050] 3. There is a consistent profile of differential gene expression in bundle sheath vs. mesophyll cells from two independent cell-type specific datasets (Li et al. (2010) Nat Genet 42: 1060-1069; Chang et al. (2012) Plant Physiol 160: 165-177)

[0051] 4. The maize TFs and their rice orthologs are mapped to different gene clusters

[0052] By applying these four criteria to the developmental transcriptomic data, the list of 118 transcription factors contained in Table 1 was obtained. Without being constrained by theory, it is likely that the differential expression profiles of these transcription factors in rice and maize indicates that these transcription factors may regulate aspects of C4 photosynthesis in maize. The sequences in Table 1 are included in the sequence listing submitted herewith.

TABLE 1
Transcription Factors proposed to regulate aspects of C4 photosynthesis

| Maize gene ID | TF name | Rice ortholog name |
|---|---|---|
| GRMZM2G061906 | ZmbHLH118 | LOC_Os05g38140 |
| GRMZM2G166946 | ZmTCP30 | LOC_Os01g55750 |
| GRMZM2G119999 | ZmHB127 | LOC_Os10g23090 |
| GRMZM2G114137 | ZmCOL8 | LOC_Os03g50310 |
| GRMZM2G177229 | ZmC3H40 | LOC_Os09g31482 |
| GRMZM2G114850 | ZmNAC108 | LOC_Os12g41680 |
| GRMZM2G143204 | ZmWRKY30 | LOC_Os03g55080 |
| GRMZM2G363052 | ZmEREB94 | LOC_Os09g13940 |
| GRMZM2G087804 | ZmGLK13 | LOC_Os01g13740 |
| GRMZM2G024976 | ZmARID6 | LOC_Os02g27060 |
| GRMZM2G701218 | ZmGLK43 | LOC_Os05g40960 |
| GRMZM2G372297 | ZmOrphan69 | LOC_Os01g37130 |
| GRMZM2G130149 | ZmMYB56 | LOC_Os12g37970 |
| GRMZM2G474326 | ZmEREB134 | LOC_Os01g54890 |
| GRMZM2G083347 | ZmNAC67 | LOC_Os12g29330 |
| GRMZM2G380377 | ZmEREB56 | LOC_Os06g03670 |
| GRMZM2G061487 | ZmEREB204 | LOC_Os08g31580 |
| GRMZM2G301089 | ZmbHLH103 | LOC_Os03g53020 |
| GRMZM2G055158 | ZmMYB142 | LOC_Os02g49986 |
| GRMZM2G056120 | ZmARF11 | LOC_Os01g54990 |
| GRMZM2G177220 | ZmARR6 | LOC_Os01g67770 |
| GRMZM2G042895 | ZmbHLH116 | LOC_Os04g23550 |
| GRMZM2G158162 | ZmABI32 | LOC_Os07g48200 |
| GRMZM2G142718 | ZmDOF41 | LOC_Os04g58190 |
| GRMZM2G166721 | ZmNAC16 | LOC_Os01g09550 |
| GRMZM2G118453 | ZmHSF26 | LOC_Os01g54550 |
| GRMZM2G416184 | ZmOrphan192 | LOC_Os09g25330 |
| GRMZM2G149756 | ZmEREB174 | LOC_Os01g64790 |
| GRMZM2G109354 | ZmSBP11 | LOC_Os05g33810 |
| GRMZM2G177386 | ZmOrphan249 | LOC_Os05g46040 |
| GRMZM2G406674 | ZmOrphan33 | LOC_Os05g45930 |
| GRMZM2G377904 | ZmOrphan326 | LOC_Os03g55320 |
| GRMZM2G030762 | ZmbHLH55 | LOC_Os01g68700 |
| GRMZM2G159937 | ZmbHLH57 | LOC_Os01g50940 |
| GRMZM2G154641 | ZmHB48 | LOC_Os01g62920 |
| GRMZM2G160005 | ZmARF27 | LOC_Os06g09660 |
| GRMZM2G143402 | ZmZIM34 | LOC_Os04g55920 |
| GRMZM2G125777 | ZmNAC12 | LOC_Os08g44820 |
| GRMZM2G112629 | ZmbHLH76 | LOC_Os01g01870 |
| GRMZM2G469551 | ZmHB69 | LOC_Os10g33960 |
| GRMZM2G116658 | ZmHB14 | LOC_Os09g35760 |
| GRMZM2G479110 | ZmARR8 | LOC_Os02g55320 |
| GRMZM2G103783 | ZmMYBR82 | LOC_Os09g31454 |
| GRMZM2G008356 | ZmABI22 | LOC_Os07g37610 |
| GRMZM2G405368 | ZmCOL1 | LOC_Os06g16370 |
| GRMZM2G106548 | ZmGRAS54 | LOC_Os07g38030 |
| GRMZM2G149958 | ZmMYB133 | LOC_Os04g58020 |
| GRMZM2G041818 | ZmGBP3 | LOC_Os03g50110 |
| GRMZM2G437460 | ZmARF12 | LOC_Os01g48060 |
| GRMZM2G128206 | ZmOrphan269 | LOC_Os03g15940 |
| GRMZM2G319187 | ZmOrphan151 | LOC_Os01g72330 |
| GRMZM2G025812 | ZmbZIP112 | LOC_Os06g41770 |
| GRMZM2G040115 | ZmOrphan159 | LOC_Os04g57800 |
| GRMZM2G120151 | ZmTCP23 | LOC_Os05g43760 |
| GRMZM2G155954 | ZmOrphan53 | LOC_Os01g61720 |
| GRMZM2G113950 | ZmNAC26 | LOC_Os02g57650 |
| GRMZM2G180979 | ZmC3H17 | LOC_Os03g49170 |
| GRMZM2G135381 | ZmGATA32 | LOC_Os05g44400 |
| GRMZM2G068973 | ZmNAC23 | LOC_Os01g60020 |
| GRMZM2G159996 | ZmOrphan268 | LOC_Os08g42440 |
| GRMZM2G018487 | ZmWRKY107 | LOC_Os03g53050 |
| GRMZM2G026833 | ZmGLK57 | LOC_Os06g24070 |
| GRMZM2G095727 | ZmOrphan208 | LOC_Os03g17570 |
| GRMZM2G010929 | ZmHB26 | LOC_Os01g05080 |
| GRMZM2G108228 | ZmTUB4 | LOC_Os04g59130 |
| GRMZM2G169820 | ZmARF1 | LOC_Os08g40900 |
| GRMZM2G098884 | ZmMYBR83 | LOC_Os06g19980 |
| GRMZM2G110582 | ZmMADS71 | LOC_Os07g27460 |
| GRMZM2G117961 | ZmMADS45 | LOC_Os08g02070 |
| GRMZM2G069713 | ZmOrphan70 | LOC_Os05g29030 |
| GRMZM2G038066 | ZmALF3 | LOC_Os07g41740 |
| GRMZM2G126026 | ZmOrphan270 | LOC_Os05g51690 |
| GRMZM2G134073 | ZmNAC9 | LOC_Os01g70110 |
| GRMZM2G006493 | ZmC3H54 | LOC_Os12g18120 |
| GRMZM2G001577 | ZmOrphan109 | LOC_Os10g30880 |
| GRMZM2G055180 | ZmEREB198 | LOC_Os04g46220 |
| GRMZM2G141299 | ZmWRKY103 | LOC_Os01g54600 |
| GRMZM2G171852 | ZmDOF22 | LOC_Os02g45200 |
| GRMZM2G158252 | ZmOrphan248 | LOC_Os10g21810 |
| GRMZM2G073427 | ZmbZIP111 | LOC_Os12g40920 |
| GRMZM2G079470 | ZmGRAS33 | LOC_Os10g40390 |
| GRMZM2G139688 | ZmMYB138 | LOC_Os01g59660 |
| GRMZM2G421899 | ZmARID5 | LOC_Os02g48370 |
| GRMZM2G169000 | ZmOrphan312 | LOC_Os02g46490 |
| GRMZM2G059851 | ZmHSF6 | LOC_Os02g32590 |
| GRMZM2G159161 | ZmOrphan359 | LOC_Os04g54400 |
| GRMZM2G021777 | ZmCOL3 | LOC_Os02g39710 |
| GRMZM2G314882 | ZmbHLH128 | LOC_Os02g02480 |
| GRMZM2G016749 | ZmOrphan148 | LOC_Os04g33080 |
| GRMZM2G052667 | ZmEREB102 | LOC_Os09g26420 |
| GRMZM2G073892 | ZmbZIP38 | LOC_Os02g58670 |
| GRMZM2G449950 | ZmDOF9 | LOC_Os02g49440 |
| GRMZM2G145041 | ZmMYBR96 | LOC_Os06g51260 |
| GRMZM2G112764 | ZmMYBR26 | LOC_Os08g04840 |
| GRMZM2G028039 | ZmGRAS45 | LOC_Os03g09280 |
| GRMZM2G116785 | ZmbHLH5 | LOC_Os06g09370 |
| GRMZM2G103647 | ZmbZIP17 | LOC_Os06g45140 |
| GRMZM2G481163 | ZmTHX4 | LOC_Os10g41460 |
| GRMZM2G089501 | ZmbHLH106 | LOC_Os09g29930 |
| GRMZM2G126808 | ZmHB45 | LOC_Os03g12860 |
| GRMZM2G097726 | ZmPHD3 | LOC_Os07g08880 |
| GRMZM2G092214 | ZmTCP8 | LOC_Os01g69980 |
| GRMZM2G019106 | ZmbZIP71 | LOC_Os02g03580 |
| GRMZM2G113127 | ZmCA5P13 | LOC_Os08g38780 |
| GRMZM2G384339 | ZmHSF22 | LOC_Os03g63750 |
| GRMZM2G110333 | ZmEREB90 | LOC_Os02g54160 |
| GRMZM2G126832 | ZmOrphan168 | LOC_Os09g14540 |
| GRMZM2G397948 | ZmOrphan73 | LOC_Os01g73750 |
| GRMZM2G006416 | ZmOrphan85 | LOC_Os09g38550 |
| GRMZM2G045544 | ZmPHD22 | LOC_Os02g48810 |
| GRMZM2G414844 | ZmZHD6 | LOC_Os05g50310 |
| GRMZM2G138421 | ZmSBP6 | LOC_Os03g61760 |
| GRMZM2G127537 | ZmHB11 | LOC_Os09g27450 |
| GRMZM2G123876 | ZmC3H30 | LOC_Os03g61110 |
| GRMZM2G161544 | ZmOrphan310 | LOC_Os07g45170 |
| GRMZM2G027972 | ZmWRKY87 | LOC_Os08g38990 |
| GRMZM2G124495 | ZmGLK52 | LOC_Os04g56990 |
| GRMZM2G040452 | ZmOrphan350 | LOC_Os02g13100 |

### Example 2

### Filtering of the 118 Transcription Factors to Prioritize Testing

[0053] In order to prioritize the TFs described in Example 1 for further testing, additional filtering was performed. The expression levels of each of the maize TFs and the corresponding rice TFs in Table 1 were compared at each of the 15 gradients in a unified developmental model (UDM). A ratio of maize expression to rice expression level was calculated for each TF pair at each gradient. The maximum and minimum ratios were calculated for each TF pair. The ten TFs from the list of 118 TFs in Table 1 were then selected with the greatest maize:rice expression ratio and the ten TFs from the list of 118 TFs in Table 1 with the smallest maize:rice expression ratio were also selected.

[0054] The filtering procedures described here resulted in the selection of twenty maize TFs and their corresponding rice orthologs that show widely divergent expression profiles between rice and maize. These TFs are listed in Table 2. Without being constrained by theory, it is expected that these divergent expression profiles are likely to reflect a change in the function of these TFs in vivo. These twenty TF pairs may be prioritized from the list of 118 TF pairs in Table 1 for further testing and characterization.

TABLE 2
Transcription factor pairs that may be prioritized for additional testing and
characterization

| Largest Maize:Rice Ratios | | | Smallest Maize:Rice Ratios | |
|---|---|---|---|---|
| Maize | Rice | — | Maize | Rice |
| GRMZM2G073892 | LOC_Os02g58670 | | GRMZM2G055180 | LOC_Os04g46220 |
| GRMZM2G079470 | LOC_Os10g40390 | | GRMZM2G117961 | LOC_Os08g02070 |
| GRMZM2G103647 | LOC_Os06g45140 | | GRMZM2G141299 | LOC_Os01g54600 |
| GRMZM2G108228 | LOC_Os04g59130 | | GRMZM2G112629 | LOC_Os01g01870 |
| GRMZM2G397948 | LOC_Os01g73750 | | GRMZM2G159937 | LOC_Os01g50940 |
| GRMZM2G119999 | LOC_Os10g23090 | | GRMZM2G301089 | LOC_Os03g53020 |
| GRMZM2G130149 | LOC_Os12g37970 | | GRMZM2G377904 | LOC_Os03g55320 |
| GRMZM2G142718 | LOC_Os04g58190 | | GRMZM2G469551 | LOC_Os10g33960 |
| GRMZM2G159996 | LOC_Os08g42440 | | GRMZM2G701218 | LOC_Os05g40960 |
| GRMZM2G363052 | LOC_Os09g13940 | | GRMZM2G114850 | LOC_Os12g41680 |

[0055] Genes encoding the TFs listed in Table 2 are cloned in a binary vector, operably linked with a promoter functional in a plant cell and a terminator sequence. The binary vector is transformed into Agrobacterium tumefaciens cells, and the A. tumefaciens cells harboring said binary vector are contacted with plant tissue suitable for transformation and regeneration. Following contact with the A. tumefaciens cells, the plant cells are placed on a suitable tissue culture medium for regeneration of plants. These plants are cultivated and assayed for the expression levels of the TF(s) of interest, and the growth characteristics of said plants are assayed in order to determine the effects of TF expression in said plants.

### Example 3

### Derivation of Cis-Regulatory Elements Likely to Drive Expression in a Cell-Specific Manner

[0056] A key feature in C4 photosynthesis is the partitioning of photosynthetic activities between two adjacent cell types and in maize this occurs largely through transcriptional control. In a dicot system, it has been shown that a cis-element from a C4 plant can be recognized and confers the same cell-specific pattern of expression in a C3 plant. Thus, one mechanism of differential gene expression appears to be exploiting existing cis-elements conserved between C3 and C4 species. To identify novel cis-elements that drive cell-type specific gene expression in C4 photosynthetic differentiation, promoter sequences were compared between maize and rice from photosynthetic clusters, which include most C4 carbon shuttle genes. Sequences within 3 kb upstream from the start codon of all maize and rice genes in these clusters were examined and then searched for occurrences of ELEMENT-defined motifs in all maize genes from the same cluster. The occurrence (counts) was then tested for enrichment of genes that are highly differentially expressed between BS and ME cells.

[0057] A putative cis element (RGCGR; R=A/G) was found to be over-represented in ME-enriched genes in cluster 3. Its presence can be detected upstream of coding regions in several ME-specific carbon shuttle genes, including pyruvate orthophosphodikinase (PPDK), PPDK-regulatory protein (PPDK-RP), Phosphoenol pyruvate carboxylase (PEPC) and carbonic anhydrase (CA). To further examine this putative element, we used CoGe (Lyons and Freeling 2008 Plant J 53: 661-673) to extract synteny-based conserved sequences in the promoter regions of maize, Sorghum, Setaria italica, and rice CA genes. The candidate cis element is found only in promoters of C4 grasses (maize, sorghum and S. italica), but is absent in rice. Interestingly, the motif is present multiple times in the promoter regions of photosynthetic genes of C4 grasses, a feature thought to increase the efficacy of cis-elements (Mehrotra et al. (2005) J Genet 84: 183-187).

[0058] A conserved motif “WAAAG” (W=T/A) was enriched in BS-specific genes and appears to be the core component of Dof transcription factors (Yanagisawa and Schmidt (1999) Plant J 17: 209-214). The maize PEPCK gene belongs to cluster 1 and may function in a C4 carbon shuttle (Wingler et al. (1999) Plant Physiol 120: 539-546). We identified a highly conserved non-coding region upstream of PEPCK using CoGe that contained “WAAAG” motifs present as a reverse-complement tandem repeat within the sequence, and is conserved in both C4 and C3 grasses. Interestingly, the native rice PEPCK gene is also expressed in a cell type specific manner (only in BS, vascular and epidermal cells; Nomura et al. (2005) Curr Opin Plant Biol 8:361-368. Thus, unlike the “RGCGR” motif, the “WAAAG” motif was likely recruited from ancestral C3 species to drive cell-specific gene expression. Without being constrained by theory, we speculate that the “WAAAG” element functions combinatorially with other motifs in C4 PEPCK genes to drive high levels of BS-cell specific gene expression. In summary, we have developed a novel algorithm for ELEMENT to define candidate cis-regulatory elements that drive both BS- and M-cell specific gene expressions. Additional candidate cis-regulatory elements are shown in Table 3.

TABLE 3
Candidate cis-regulatory elements that may drive cell-specific expression
of a gene of interest

| BS | ME |
|---|---|
| Candidates | Candidates |
| ACCAGTA | AGCGA |
| CGCGGC | CAGCGG |
| GACCAC | CAACG |
| AGAGATA | ACTCGC |
| ACACAT | CGCCA |
| GGCCACA | AATACG |
| AAAAGC | ACTAG |
| ATGTGTC | ACGTA |
| CACACAC | GCCAC |
| CTCACTC | AGCGTA |
| ACGTCG | GCGAC |
| AAAAGTA | CTTACGCC |
| CGAGCA | AACGC |
| ACGTGA | GACGC |
| GTGTGA | CCGCA |
| GTAGTA | CAGCAGC |
| CACACAC | CACTCG |
| CGCGGC | CTTTCA |
| GACCAC | CGATCGA |
| ACACAT | ATTGTCC |
| TAAAGG | GGCGAA |
| ACGGCC | TAGCTAA |
| ACGTC | ACGAATG |
| CGTTA | CGCATA |
| CTCTCC | ATAGTA |
| ACGAC | ATTTGTC |
| ACGTGC | CGCCACG |
| CGGAAAG | CCAATC |
| AACGT | GGCGA |
| CAACG | AGCGG |
| ACGGA | GGCGG |

### Example 4

### Use of a Cis-Regulatory Element to Construct a Synthetic Promoter that May be Used to Drive a Gene of Interest

[0059] The RGCGR element described above was used to construct a novel synthetic promoter. This promoter was used to drive the expression of a gene of interest, resulting in significant accumulation of the encoded mRNA and protein. An approximately 60 bp region at roughly 120 bp upstream of the maize CA1 gene (on the world-wide web at genomevolution.org/r/7hwg) was found to be conserved in sorghum (Sorghum bicolor), maize (Zea mays), foxtail millet (Setaria italica), and rice (Oryza sativa). A novel promoter was constructed using the RGCGR sequence element from sorghum. This sequence element was repeated four times and combined with a minimal promoter element derived from the sorghum carbonic anhydrase gene (S. bicolor chromosome 3: 57333341-57333511). The novel promoter sequence (SEQ ID NO: 1) was termed the 4×RGCGR promoter.

[0060] The 4×RGCGR promoter was used to drive expression of a codon-optimized version of the maize SBPase gene (SEQ ID NO: 2) in Brachypodium distachyon and in rice (Oryza sativa). A binary vector plasmid was constructed using standard molecular biology protocols in which the 4×RGCGR promoter was placed upstream of the SBPase open reading frame (SEQ ID NO: 2). This plasmid also contained a selectable marker gene for plant transformation in order to allow for the selection of transformed plant cells. This plasmid was transformed into Agrobacterium tumefaciens cells that were in turn used to transform B. distachyon and O. sativa. The transformed plant cells were regenerated using plant tissue culture techniques. DNA was extracted from the regenerated plants and was tested by PCR to ensure the presence of the full SBPase expression cassette including the 4×RGCGR promoter, the SBPase open reading frame, and other necessary genetic elements to ensure the proper transcription and translation of the transgene.

[0061] Following the verification of the presence of the SBPase transgene cassette, leaf samples were collected for protein extraction. Total leaf protein was extracted in standard Tris-buffered saline containing Tween-20 (TBST buffer) and was tested by ELISA for the presence of SBPase protein. The primary antibody was generated in rabbit against a recombinant SBPase protein, and was a gift of Paul Hwang (Washington State University). The secondary antibody was goat anti-rabbit antibody (Thermo-Fisher Scientific). ELISA assays clearly showed a statistically significant increase in SBPase content in the transgenic B. distachyon plants transformed with the 4×RGCGR-SBPase cassette.

[0062] The average SBPase content of the seven wild-type B. distachyon plants tested was 0.88±0.27% TSP, while the average SBPase content of the seven B. distachyon plants transformed with the 4×RGCGR-SBPase construct was 6.78±1.54% TSP (Student's t-test p=0.0001, paired, two-tailed distribution).

[0063] Protein was also extracted from transgenic rice leaves essentially as described above for B. distachyon, and the resulting protein extracts were tested by ELISA using the protocol described above. For the testing of rice protein extracts, the rice flag leaves were divided into ten equal sections from base to tip with segment 1 at the base and segment 10 at the leaf tip. The protein extracts from each leaf section were tested separately. The results clearly showed that the rice leaf from the plant transformed with the 4×RGCGR-SBPase construct contained significantly more SBPase protein than the leaves of wild-type rice plants.

[0064] Transcription profiling was performed on these transgenic rice plants. The flag leaf from each plant was collected and divided into five equal segments. The Trizol (Life Technologies) method was used to extract total RNA. cDNA synthesis was performed using anchored oligo d(T) primers and M-MuLV Reverse Transcriptase (New England BioLabs). qRT-PCR using SYBR green (BioRad Laboratories) was performed with primers specific to the transgenic SBPase (SEQ ID NOs: 537 and 538), the native rice SBPase (SEQ ID NOs: 539 and 540), and a rice control gene (UBQ5) (SEQ ID NOs: 541 and 542). These qRT-PCR experiments clearly showed that the transgenic plants accumulated significant amounts of SBPase transcript driven from the 4×RGCGR promoter.

[0065] These results clearly demonstrate that the 4×RGCGR promoter can function effectively in both B. distachyon and O. sativa to drive increased expression of an SBPase gene and accumulation of the encoded SBPase protein. It will be well-understood that the 4×RGCGR promoter is not limited to overexpression of an SBPase gene, but may be used to drive the expression of any gene of interest that has been cloned into a binary vector for plant transformation.

[0066] The RGCGR element was used to successfully drive overexpression of a gene of interest by combining this cis-regulatory element with a core promoter element derived from the S. bicolor carbonic anhydrase gene. It will be well-understood by one skilled in the art that other core promoter elements may be used from a wide variety of plant promoters derived from a wide variety of plant species. Such core promoter elements have been described in the scientific literature (Kumari and Ware 2013 PLoS One 8: e79011). The RGCGR cis-regulatory element was derived from bioinformatic analyses of rice and maize transcriptomic data, as described above. Similar analyses uncovered the cis-regulatory elements listed in Table 3. It will be well-understood by one skilled in the art that the cis-regulatory elements listed in Table 3 may be combined with a core promoter element in order to generate novel synthetic promoters that may be used to drive expression of a gene of interest in plant cell.

### Example 5

### Use of Cis-Regulatory Elements to Alter the Expression of a Native Plant Gene

[0067] The cis-regulatory elements listed in Table 3 are used to alter the expression of a native plant gene of interest through the use of genome-editing technologies. For this work, at least one copy of one or more of the cis-regulatory elements listed in Table 3 is inserted into a plant genome at a pre-determined site through the use of a site-specific meganuclease or other site-specific insertion method. The insertion site is determined so that the cis-regulatory element is inserted immediately upstream of the core promoter element of the native plant promoter. This strategy is well-understood and has been demonstrated previously to insert a transgene at a predefined location in the cotton genome (D'Halluin et al. (2013) Plant Biotechnol J 11: 933-941). It will be obvious to those skilled in the art that other technologies can be used to achieve a similar result of insertion of genetic elements at a predefined genomic locus (e.g., CRISPR-Cas9, TALENs, and other technologies for precise editing of genomes; Feng et al. (2013) Cell Res 23: 1229-1232, Podevin et al. (2013) Trends Biotechnol 31: 375-383, Wei et al. (2013) J Genet Genomics 40: 281-289, Zhang et al. (2013) Plant Physiol DOI:10.1104/pp. 112.205179). The insertion of one or more copies of one or more of the cis-regulatory elements listed in Table 3 using a technology for genome editing will allow one skilled in the art to manipulate the expression of a downstream native plant gene of interest. The resulting expression profile may show higher or lower expression than the native plant gene. Through the use of the appropriate cis-regulatory elements, a cell-specific expression profile, developmentally-regulated expression profile, circadian cycle-regulated profile, tissue-specific expression profile, inducible expression profile, or other non-constitutive expression profile may be obtained.

### Example 6

### Altering the Expression of Transcription Factors in Planta

[0068] The transcription factors listed in Table 1 were derived from bioinformatic analyses of rice and maize developmental transcriptomes. These TFs are proposed to regulate aspects of photosynthesis, which in turn has been linked to plant growth and crop yield (Long et al. (2006) Plant Cell Environ 29: 315-330). By altering the expression level and/or expression profile of one or more of the TFs listed in Table 1, plant growth rates and/or crop yields will be improved.

[0069] One or more of the TFs listed in Table 1 may be overexpressed in a crop plant of interest by cloning an open reading frame encoding the TF or TFs of interest downstream of a promoter that is functional in a plant cell. The TF expression cassettes may be transformed into a plant species of interest using a variety of methods including Agrobacterium-mediated transformation or biolistic transformation. It will be well-understood by one skilled in the art that additional techniques to insert DNA into a plant genome may also be used to achieve the goal of overexpression of one or more TFs.

[0070] Alternatively, one or more of the TFs listed in Table 1 may be down-regulated using RNAi, amiRNA, or other well-understood techniques to down-regulate the expression of a gene of interest. For these experiments, an RNAi or amiRNA construct designed against the coding region for one or more of the TFs listed in Table 1 is designed and placed downstream of a promoter that is functional in a plant cell. The resulting RNAi or amiRNA cassette or cassettes are cloned into a vector suitable for the transformation of a plant cell and are used to transform the plant species of interest. Said transformation may be realized by using a variety of methods including Agrobacterium-mediated transformation or biolistic transformation. It will be well-understood by one skilled in the art that additional techniques to insert DNA into a plant genome may also be used to achieve the goal of downregulation of one or more TFs in planta.

[0071] Alteration of the expression of one or more of the TFs listed in Table 1 may be achieved through the use of precise genome-editing technologies. A nucleic acid sequence will be inserted proximal to a native plant sequence encoding the TF of interest through the use of a meganuclease designed against the plant genomic sequence of interest. This strategy is well-understood and has been demonstrated previously to insert a transgene at a predefined location in the cotton genome (D'Halluin et al. (2013) Plant Biotechnol J 11: 933-941). It will be obvious to those skilled in the art that other technologies can be used to achieve a similar result of insertion of genetic elements at a predefined genomic locus (e.g., CRISPR-Cas9, TALENs, and other technologies for precise editing of genomes; Feng et al. (2013) Cell Res 23: 1229-1232, Podevin et al. (2013) Trends Biotechnol 31: 375-383, Wei et al. (2013) J Genet Genomics 40: 281-289, Zhang et al. (2013) Plant Physiol DOI:10.1104/pp. 112.205179). The insertion of said nucleic acid sequences will be used to achieve the desired result of overexpression of one or more of the TFs listed in Table 1. Alternatively, through the use of the appropriate nucleic acid sequences, downregulation of one or more of the TFs listed in Table 1 may be achieved.

[0072] Alteration of the expression of one or more of the TFs listed in Table 1 may also be achieved through the use of self-replicating DNA sequences derived from plant viruses rather than through the stable insertion of the gene or genes of interest into the plant nuclear genome. Sequences derived from plant viruses such as the Geminivirus have been used successfully to achieve expression of multiple genes of interest in a plant (Mozes-Koch et al. (2012) Plant Physiol 158: 1883-1892). By inserting a gene or genes encoding one or more of the TFs listed in Table 1 into a self-replicating construct derived from a plant virus, upregulation of said TFs may be achieved in the plant species of interest by transforming the virus-derived construct into the plant cells and selecting for transformed cells. Alternatively, down-regulation of the TF or TFs of interest selected from the group of TFs listed in Table 1 may be achieved by inserting an amiRNA or RNAi construct designed against one or more of the TFs listed in Table 1 into a plant transformation construct derived from a plant virus. The resulting construct may be transformed into the plant cells of a plant species of interest. Selection for transformed cells and regeneration of plants containing the self-replicating constructs will result in the desired alteration in the expression level and/or expression profile of the TF or TFs of interest.

[0073] The TFs listed in Table 1 originate from rice (Oryza sativa) and from maize (Zea mays). The use of one or more of the techniques described herein may lead to an altered expression profile for one or more of the TFs listed in Table 1. Without being limited by theory, it is expected that plant lines with an altered expression profile for one or more of these TFs will exhibit improved plant growth and/or improved crop yield. It will be well-understood to one skilled in the art that closely related homologs or orthologs of the TFs listed in Table 1 may be used in the altered expression strategies described in this Example in order to achieve substantially the same result of an altered TF expression profile leading to improved plant growth and/or improved crop yield. Methods for the identification of orthologous genes have been described in the scientific literature and may be used to identify TFs that are orthologous to the TFs listed in Table 1 (Li et al. (2003) Genome Res 13: 2178-2189; Fulton et al. (2002) Plant Cell 14: 1457-1467). Such orthologous genes may be used in strategies including those described herein to achieve the desired up- or down-regulation of a TF or TFs of interest in the plant species of interest.

### Example 7

### Determining TF Binding Sites

[0074] The binding sequences of TFs of interest may be determined through a yeast one-hybrid assay approach. In this approach, the TFs listed in Table 1 are cloned into a vector suitable for protein production in a microbial system (e.g., a pET-series vector; Life Technologies). The TFs are produced in a suitable microbe harboring the protein production plasmid and purified. The purified TFs are screened against a synthetic promoter library in yeast one-hybrid assays. This promoter library contains all 8-mer DNA sequences in at least two different contexts. The results of these yeast one-hybrid assays are the binding sites for the TF being tested. Similar strategies have been described in the scientific literature for the determination of TF binding sites based on yeast one-hybrid assay screening (Pruneda-Paz et al. (2009) Science 323: 1481-1485).

[0075] Once the binding sequence has been determined for a TF of interest, this sequence may be used to query the genome of a plant species of interest. Locations within the plant genome that contain the binding sequence for the TF of interest would be likely to interact with the TF in planta. Thus, strategies in which the expression of the TF of interest is altered in the plant of interest would be likely to alter the expression of genes located in close proximity to these binding sites. By locating the nearest open reading frames in either direction from the TF binding site within the plant genome, one skilled in the art could reasonably expect that the expression of these open reading frames would themselves be affected by altering the expression of the TF of interest. Once these open reading frames have been identified, the expression of these genes will be altered directly in planta. Upregulation of these genes will be accomplished by transforming the plants of interest with a vector containing the open reading frame operably linked to a promoter that is operable in a plant cell and then regenerating a transformed plant. The resulting plant will be screened by qRT-PCR, Northern blotting, or other suitable assays to determine transcript levels for the gene or genes that are being overexpressed. Alternatively, downregulation of the genes whose expression is likely to be regulated by the TF of interest will be achieved by transforming a plant species of interest with a plant transformation vector containing an amiRNA sequence designed against these genes. Following transformation, plants will be regenerated, and the resulting plants will be screened by qRT-PCR, Northern blotting, or other suitable assays to determine transcript levels for the gene or genes that are being overexpressed. The growth of transformed plants in which the expression of these genes (i.e., the genes whose expression is regulated by the TFs listed in Table 1) has been altered will be monitored through measurements of the plants. Following maturation of the plants, the total biomass of the plants will be weighed and compared against the total biomass of untransformed wild-type plants. Similarly, the seeds of the transformed plants will be collected and weighed and compared against the total seed weight of untransformed wild-type plants. Without being limited by theory, it is expected that the direct manipulation of the expression of genes whose expression is regulated in part by the TFs listed in Table 1 will cause improved growth and/or improved crop yield in plants.

### Example 8

### Exploring the Mechanism of C₄ Photosynthetic Differentiation Through a Unified Comparative Analysis of Maize and Rice Leaf Transcriptomes

[0076] In this study, we explore the leaf transcriptomes of maize (C₄) and rice (C₃), to identify novel structural and regulatory components necessary for photosynthesis. By analyzing the metabolic profiles and correlating orthologous gene expression, we have developed a mathematical model to directly compare two similar developmental gradients and performed cluster analysis to define patterns of maize and rice gene expression. Functional enrichment tests coupled with cis-regulatory mining tools identify candidate motifs likely to have been recruited in the evolution of C₄ photosynthesis. Using these highly resolved transcriptional profiles, we propose a model of suberin biosynthesis—structural features associated with NADP-ME subtype C₄ grasses, and define likely transcriptional regulators of the pathway. We also developed several community tools including an expression viewer to enable broad access to these datasets and provide a foundation for understanding and ultimately engineering C₄ traits into C₃ grasses.

### Results—Metabolic Profiles Along the Maize and Rice Leaf Developmental Gradients

[0077] Grass leaves are initiated and develop along a basipetal axis that is distinct from eudicots. This feature facilitates developmental comparisons among different grass species and enables sampling of discrete developmental stages at one fixed time point. Previously, we analyzed the transcriptome of the maize leaf at four developmental stages, and investigated the dynamic changes in gene expression in these segments (Li, P. et al. (2010) Nat Genet 42: 1060-7). In this study, we conduct an inter-specific comparative analysis of photosynthetic differentiation in rice and maize integrating transcriptomics and metabolomics datasets.

[0078] Plants used in this study were grown under controlled light, temperature and humidity regimes as previously described (Li, P. et al. (2010) Nat Genet 42: 1060-7). Source and sink boundaries were defined using ¹⁴C labeling in both species using a previously detailed method (Li, P. et al. (2010) Nat Genet 42: 1060-7) and corresponded approximately to the position of the 2^{nd} leaf ligule on leaf 3; leaf segments were then collected from this “anchor point” with defined increments (Methods). To calibrate the leaf gradients, primary and secondary metabolites were measured from 15, 1 cm segments for maize and 11, 2 cm segments for rice. Activities of Calvin Benson cycle enzymes (e.g. Rubisco, NADP-GAPDH) rose >10-fold during leaf development with the increase occurring mainly between segments 2-8. This was closely paralleled by an increase of C₄ enzymes (e.g. PEPC, NADP-malate dehydrogenase; R² between Rubisco and PEPC=0.98). Levels of intermediates involved in intercellular metabolite shuttles also rose between segments 2-8 (R² of the correlation between PEPC and DHAP, 3PGA and pyruvate=0.98, 0.96 and 0.90, respectively). As previously seen, malate unexpectedly peaked in the mid segments and declined at the leaf tip. As expected for a C₃ species, mature rice leaves had higher rates of photorespiration, which was evident from measurements of photorespiratory intermediates including as glycine, glutamine and serine in the photosynthetically active regions of the leaf. This contrasted with maize in which glycine, glutamine and serine were highest in the immature sectors, where the photosynthetic machinery had not yet fully developed. The profiles of most other amino acids also showed opposite trends in the two species. The results in rice support the idea that there is a strong interdependency of nitrogen (N) metabolism and photosynthesis in C₃ plants. C₃ photosynthesis is unavoidably accompanied by photorespiration, which involves the conversion of glycine to serine and the rapid release of ammonium that is re-fixed in parallel with de novo assimilation of nitrate and ammonium (Nunes-Nesi, A. et al. (2010) Mol Plant 3: 973-96; Xu, G. et al. (2012) Annu Rev Plant Biol 63: 153-82). The radically different distribution of amino acids in maize suggests that N metabolism is not tightly coupled to photosynthesis in C₄ plants, and points to the non-photosynthetic leaf sectors at the base playing a predominant role in N assimilation.

### A Unified Developmental Model for Comparative Transcriptomics of Maize and Rice Leaves

[0079] Using the same tissues samples from which the metabolite profiles were generated, we performed RNA-seq using a high-throughput library construction protocol (Wang, L. et al. (2011) PloS one 6: e26426) (Methods). An average of 13.8 million 32 bp reads/segment and 207 million reads total were obtained for the maize leaf segments and an average of 22.1 million 32 bp reads/segment and 243 million reads total were obtained for rice. A list of 30,530 maize-rice orthologous genes were generated and used to survey the correlation of gene expression in rice and maize. A heat map profile showing Spearman's rank correlations reveals a similar and continuous transcriptome gradient between maize and rice, yet the different number of segments and the differences identified from metabolic profiles preclude direct comparisons between individual rice and maize leaf segments.

[0080] To date, intraspecific analysis of RNA-seq datasets have been limited to post-processing comparisons. That is, network analysis, functional enrichment and transcriptional regulatory components have been performed within species and then datasets compared between species. Here we exploit the uniformity of two highly similar developmental and experimental grass leaf systems to perform an integrated comparative transcriptomics study. To account for the different number of segments sampled along the leaves and variation in developmental progression, we constructed a unified developmental model (UDM) to equate the developmental stages between the two species. Using a core set of 3,559 anchor genes representing high-confidence orthologous gene pairs that have similar profiles of gene expression and likely retain similar functionality in rice and maize (See method for details), we established a common developmental axis onto which segments from both maize and rice could be mapped. This approach preserves the order of segments along leaves and does not force the segments to be equally spaced along the common axis. Given the mapped locations of all the leaf segments, we fitted an expression profile for each maize and rice gene expressed along the common axis. Expression comparisons across species became feasible using the fitted profiles despite the developmental variation and different segment numbers used to profile gene expression. To validate the RNA-seq results and the UDM, we selected 48 maize and rice genes with expression profiles spanning four orders of magnitude and surveyed expression using qRT-PCR. It is evident the RPKM values before and after model fitting are consistent with the qPCR results, with genes expressed at low levels showing more variation than those expressed at high levels. Thus the UDM enables an integrated analysis of maize and rice gene expression data despite 41 million years of evolutionary divergence (on the world-wide web at www.timetree.org). Furthermore, applying the UDM to additional plant and animal systems will be possible when well-calibrated developmental and experimental datasets have been generated.

### Cluster Analysis and the Discovery of Candidate Photosynthesis Cis-Regulatory Elements

[0081] To test the efficacy of the UDM we used a modified K-means clustering method (Methods) to examine the expression of genes necessary for photosynthetic differentiation. We generated 30 clusters that capture the major trends along the gradient. The TopGO package (Alexa, A. et al. (2006) Bioinformatics 22: 1600-7) (Methods) identified clusters 1, 3, 4 and 6 as containing genes significantly over-represented with photosynthesis-related GO annotations. Clusters 1, 3 and 4 share similar profiles of gene expression; expression values are low at the base of the leaf peaking at or near the tip of the leaf. In cluster 6, peak expression occurs earlier, near the mid-point of the leaf, representing the source-sink boundary. Genes in cluster 6 include those for tetrapyrrole metabolism, chloroplast targeting and secondary cell wall biosynthesis. (Li, P. et al. (2010) Nat Genet 42: 1060-7; Prioul, J. L. et al. (1980) Plant Physiology 66: 770-4; Miranda, V. et al. (1981) New Phytologist 88: 595-605). Genes in clusters 1, 3 and 4 include those encoding components of the Calvin cycle, photosystems I and II and electron transport. Thus, the expression of genes required for plastid biogenesis precedes the expression of genes required for the implementation of photosynthesis. The UDM indicates that photosynthetic development has proceeded further in rice than maize. This is also evident from the measurements of maize and rice metabolites, as the maize profiles of the starch degradation intermediate maltose (Smith, A. M. et al. (2005) Annu Rev Plant Biol 56: 73-98) and the Calvin-Benson cycle intermediate 3-PGA seem to correspond to the base portions of rice profiles along the leaf gradient. These observations are consistent with the slight enrichment of rice genes in cluster 1 and maize genes in cluster 3, as only correlated regions from the maize and rice leaf were used for clustering.

[0082] As the clusters were generated by the UDM, we could exploit the evolutionary distance between maize and rice as a phylogenetic filter to identify conserved cis-elements associated with genes encoding photosynthetic components. A modified ELEMENT algorithm (Mockler, T. C. et al. (2007) Cold Spring Harb Symp Quant Biol 72: 353-63) was developed to incorporate a background correction for multi-species analysis (on the world-wide web at element.mocklerlab.org/). We then searched for motifs associated with photosynthesis in an Arabidopsis cis-element database—AtCOECIS, (Piganeau, G. et al. (2009) J Mol Evol 69: 249-59) as some of the candidates enriched in maize and rice are also conserved in A. thaliana. For instance, from cluster 6, we identified the sequence “ACGTAC” as a motif found upstream of genes associated with photosynthesis (on the world-wide web at bioinformatics.psb.ugent.be/cgi-apps/ATCOECIS/show_motif.htpl?value=GCCACGTN). Similar results were observed in cluster 3, where candidate cis-elements such as “ACGTGTC” (on the world-wide web at bioinformatics.psb.ugent.be/cgi-apps/ATCOECIS/show_motif.htpl?value=CACGTGTC) and “CACGTA” were conserved among maize, rice and A. thaliana. Taken together, the clustering analysis indicates a conservation of putative trans-acting factors that regulate photosynthetic gene expression across angiosperms. However, additional motifs, not conserved between the grasses and A. thaliana may have driven the diversification of photosynthetic development between monocot and dicot lineages.

### Methods

### Plant Growth and RNA-Sequencing Experiment

[0083] Maize and rice growth conditions were as previously described (Li, P. et al. (2010) Nat Genet 42: 1060-7; Wang, L. et al. (2011) PloS one 6: e26426). Nine day old third leaves of maize were cut into fifteen 1 cm segments; samples were pooled from an average of seven plants per biological replicate and six biological replicates in total were collected on different dates. 14 day old third leaves of rice were cut into eleven 2 cm segments, samples were pooled from an average of 15 plants per biological replicate and four replicates in total were collected. Total RNA was extracted using TRIzol® (Invitrogen, CA) following manufactory's suggestion. Subsequent RNAseq library construction procedures are detailed in Supplementary File 1. A total of 90 maize and 44 rice leaf libraries were indexed/pooled and sequenced on the Illumina HiSeq 2000® machine, reads were sequenced, deconvoluted and filtered using the manufacture's default pipeline and parameters. The reads were aligned to the maize reference genome B73 AGPv2 using Tophat (Trapnell, C. et al. (2009) Bioinformatics 25: 1105-11). Read counting and calculation of RPKM were described previously, (Wang, L. et al. (2011) PloS one 6: e26426) and later verified with Cuffdiff (Trapnell, C. et al. (2013) Nat Biotechnol 31: 46-53). The variance between replicates is small. The average Pearson correlation between rice replicates is 0.95+−0.07. The average Pearson correlation between maize replicates is 0.97+−0.07. Post-processing of the reads and calculation of RPKM were described previously (Wang, L. et al. (2011) PloS one 6: e26426). Reads were pooled from individual biological replicates to achieve deeper coverage of gene expressed at low levels (Li, P. et al. (2010) Nat Genet 42: 1060-7). The raw reads were uploaded to GEO under accession GSE54274.

### Determination of Maize and Rice Orthologs

[0084] Orthologous maize and rice genes were determined first by combining the results from a number of known methods, including BBH-LS (Zhang, M. et al. (2012) BMC Systems Biology 6), Ensembl (Hubbard, T. et al. (2002) Nucleic Acids Res 30: 38-41), MSOAR2 (Shi, G. et al. (2010) BMC Bioinformatics 11: 10), INPARANOID (Ostlund, G. et al. (2010) Nucleic Acids Res 38: D196-203) and ORTHOMCL (Chen, F. et al. (2006) Nucleic Acids Res 34: D363-8). The results from individual methods were assembled into a non-redundant exhaustive list of orthologous pairs in many-to-many relationships that were then filtered to identify one-to-one orthologous gene pairs by choosing the pairs with highest correlation based on non-fitted expression data along the rice and maize leaf gradients.

### Constructing a Unified Maize-Rice Leaf Developmental Model

[0085] To define the unified maize-rice leaf developmental gradient and map each leaf section onto this hypothetical coordinate, we developed an iterative computational algorithm as detailed below. Suppose maize leaf segment i (i=1 . . . I) is mapped to the developmental gradient Uᵢ (U₁<U₂< . . . <U_{I}), and rice leaf segment j (j=1 . . . J) mapped to the developmental gradient Vⱼ (V₁<V₂< . . . <V_{J}).

[0086] Given the values U=(U₁ . . . U_{I}) and V=(V₁ . . . V_{J}), we model the expected value of the gene expressions (RPKM values) of maize gene g of segment i (X_{gi}) as following:

E(X_{gi})=f(Uᵢ|μ_{g}^{x},α_{g}^{x},β_{g}^{x},γ_{g}^{x})=exp(μ_{g}^{x}+α_{g}^{x}Uᵢ+β_{g}^{x}Uᵢ²+γ_{g}^{x}Uᵢ³).

Similarly, we have the model for rice gene h of segment j (Yₕⱼ):

E(Yₕⱼ)=f(Vⱼ|μₕ^{y},αₕ^{y},βₕ^{y},γₕ^{y})=exp(μₕ^{y}+αₕ^{y}Vⱼ+βₕ^{y}Vⱼ²+γₕ^{y}Vⱼ³).

Note that we use a 3rd-degree polynomial function to model the logarithm of RPKM values. Based on our empirical analysis, this model is adequate and flexible enough to capture most gene expression patterns and at the same time avoid over-fitting. The model parameters μ_{g}^{x} and μₕ^{y} represent the baseline gene expressions at Uᵢ=0 and Vⱼ=0, respectively, for maize gene g and rice gene h. The parameters θ_{g}^{x}=(α_{g}^{x},β_{g}^{x},γ_{g}^{x}) and θₕ^{y}=(αₕ^{y},βₕ^{y},γₕ^{y}) capture the gene expression patterns along the leaf gradients and these parameters are of main interest. The goodness of fit of the model is evaluated by correlation.

[0087] Given the values of U and V, we can estimate the expression profiles using the above models. Given a set of genes whose expression profiles are shared between maize and rice, we then can refine the gradients by estimating U and V. Repeating these two steps results in an iterative algorithm. However, we found that some orthologous genes are not suitable for defining the developmental gradients, because they do not share similar expression patterns between the two species. Consequently, we added steps in the algorithm to select the set of “anchor” genes, a subgroup of orthologous genes from the two transcriptomes that share highly similar expression patterns, to unify the developmental gradients. Specifically, we started with two groups of 20,656 maize and 17,634 rice orthologous genes and filtered down to 9,845 one-to-one pairs with highest correlation. We then refined the number of “anchor genes” down to 3,559 using the method described below.

[0088] The following iterative algorithm simultaneously select anchor genes, estimate gene expression profiles, and estimate the developmental gradients U and V.

### Algorithm:

[0089] 1. Initialize. We set Uᵢ=Σₖ₌₁ⁱuₖ and Vⱼ=Σₖ₌₁^{j}vₖ for uₖ>0 and vₖ>0. For the initial step, we set uₖ=1/I and vₖ=1/J for every k.
[0090] 2. Estimate the shared pattern of ortholog pairs. Denote the set of orthologous gene pairs as O. For any pair (g, h) ε O, we estimate the shared pattern parameters by maximizing the correlation between the observed and predicted gene expressions:

$${θ}_{g}^{*} = {arg max}_{{θ}_{g}} \{ Corr [ {X}_{g} , f ( U \vert {μ}_{g}^{x} , {θ}_{g}^{x} = {θ}_{g} ) ] + Corr [ {Y}_{h} , f ( V \vert {μ}_{h}^{y} , {θ}_{h}^{y} = {θ}_{g} ) ] \}$$

[0091] 3. Obtain the one-to-one analogous gene pairs. The orthologs were in a many-to-many relationship. We select one to one pairs by two steps. First, we select the rice gene that gives the highest value of Corr[X_{g},P(U|θ_{g}^{x}=θ_{g}*)] when paired with maize gene g as calculated in Step 2. Then, each maize gene is only paired with one rice gene after the first step. Second, among the remaining pairs, we select the maize gene that gives the highest value of Corr[Yₕ,P(V|θₕ^{y}=θ_{g}*)] for each rice gene h i. After the two steps, we get the set of one-to-one ortholog gene pairs, and we denote the set as O*.
[0092] 4. Select anchor genes. A pair of orthologous genes are selected to be anchor genes if the observed gene expressions for both species have correlation higher than 0.8 with their shared patterns estimated from step 2:

A={(g,h)εO*:Corr[X_{g},\hat{X}_{g}]>0.8&Corr[Yₕ,Ŷₕ]>0.8}

Where \hat{X}_{g} and Ŷ_{g} are the fitted values based on the model estimated from step 2.
[0093] 5. Refine estimates of gradients using anchor genes. Using the newly defined anchor genes where θ_{g}=θ_{g}*, we re-estimate U and V. As described in step 1, Uᵢ=Σₖ₌₁ⁱuₖ and Vⱼ=Σₖ₌₁^{j}vₖ. We maximize the sum of the correlations between the observed patterns and the fitted ones:

$$\{ {u}_{i} , {v}_{j} \} = {arg max}_{0.9 < \frac{{u}_{i}}{{u}_{i}^{*}} , \frac{{v}_{j}}{{v}_{j}^{*}} < 1.1} \{ {\sum }_{( g , h ) ∈ A} Corr [ {X}_{g} , f ( U \vert {θ}_{g}^{x} = {θ}_{g} ) ] + Corr [ {Y}_{h} , f ( V \vert {θ}_{h}^{y} = {θ}_{g} ) ] \}$$

[0094] where uᵢ* and vⱼ* represent the values of uᵢ or vⱼ from previous steps. We search for the refined values of uᵢ and vⱼ within a range of ratios (between 0.9 and 1.1) when compared to their previous values in order to reduce the computation complexity.
[0095] 6. Iterate. Repeat steps 2-5 until the estimates of U and V become stable. In our analysis, five rounds of iterations were adequate.
   Applying the algorithm described above to the integrative analyses of three or more species is straightforward except that more computation is needed. Additionally, our algorithm is flexible, and it can be adapted to other models of expression profiles and criteria of model fit.

### Co-Clustering the Fitted Maize and Rice Gene Expressions

[0096] After establishing the unified gradients, U and V, we fit the expression patterns, f(U|θ_{g}^{x}) and f(V|θₕ^{y}, using gene expressions X_{g} and Yₕ for each gene g of maize and each gene h of rice, respectively.

[0097] Before clustering, genes with no clearly defined expression patterns were removed because these genes are of much less interest in the scope of our study due to low expression and/or their noisy nature. Genes whose correlations between observed patterns and fitted ones are above 0.6 are kept in the cluster analysis.

[0098] To obtain data vectors to cluster the expression patterns of all selected maize and rice genes, we took N=15 points on the fitted expression profiles for each gene. These points correspond to the same N equally spaced gradients (T₁ . . . T_{N}) with T₁<T₂< . . . <T_{N}, T₁=max{U₁,V₁}, and T_{N}=min{U_{I}, V_{J}}. Hence, only the region shared between maize and rice observed profiles is used for cluster analysis.

[0099] A hybrid hierarchical clustering algorithm was used for the cluster analysis. First we performed K-means clustering based on Pearson correlation with K=50. We then merged two clusters with highest correlation based on average linkage at a time. We stopped the merging when none of any two different clusters had an average correlation above 0.9. We obtained K=30 clusters for the final result.

### Functional Enrichment Analysis

[0100] Genome annotations was updated using the most recent released data for maize (on the world-wide web at maizesequence.org/index.html) and Rice (on the world-wide web at rice.plantbiology.msu.edu/) as input for the BLAST2GO software (Gotz, S. et al. (2008) Nucleic Acids Res 36: 3420-35). Unique full-length protein sequences were used for BLAST and the resulting GO annotations were converted into the format that is compatible with TopGO package for R¹⁴. We then followed the standard TopGO procedures detailed in its manual (Alexa, A. et al. (2006) Bioinformatics 22: 1600-7) with Fisher's statistical test that generated three tables; they contained the functional enrichment results for all 30 clusters covering three GO classes: Biological Processes, Molecular Functions, and Cellular Components.

Discovering Candidate Cis-Elements with ELEMENT Program

[0101] ELEMENT is composed of several modules, each responsible for a single specific task and is invoked separately. First, the “bground” module is used to interrogate background statistics, generally over a set of all promoter sequences in a given species, and is responsible for counting and outputting statistics for each input word or motif over each such promoter sequence. Second, count is used to interrogate foreground statistics, generally over a related subset of all promoters in a given species or group of species, and is responsible for counting and outputting statistics for each input motif, over each input foreground promoter sequence, given the background statistics calculated via “bground”. Third, filter is used to reduce large sets of results to only those that are significant, filter examines each word and respective statistics generated by count, using Benjamini-Hochberg FDR set at 5%, and then outputs only results found to be significant. Fourth, cluster is used to cluster motifs found to be significant by organizing those which are similar. More detailed about ELEMENT can be found on the world-wide web at element.mocklerlab.org.

### Screening Candidate C₄-Related Cis-Elements

[0102] We used a combined approach with ELEMENT and enrichment analysis using two-sided Wilcoxon rank-sum statistics to test for potential candidate cis-elements that contribute to cell-type specificity. First we built a list of genes that are enriched either in BS or ME cells in maize leaf tissue based on two previously published datasets (Li, P. et al. (2010) Nat Genet 42: 1060-7; Chang, Y. M. et al. (2012) Plant Physiology). When the differential expression is confirmed in both experiments, we labeled the corresponding gene as cell-type specific. We then counted the occurrences of each cis-elements by ELEMENT from cluster 3 and their reverse-complement sequences in the 3 kb upstream regions of all genes from cluster 3. Wilcoxon rank-sum derived p-values are calculated based on both BS and ME-enriched genes and for all nucleotide patterns. The ones that passed the filter is then visualized using WebLogo (Crooks, G. E. et al. (2004) Genome Res 14: 1188-90)

Validating RNA-Seq Results and the Unified Model Using qRT-PCR

[0103] Plant materials for validation were grown independent using same conditions previously described (Li, P. et al. (2010) Nat Genet 42: 1060-7; Wang, L. et al. (2011) PloS one 6: e26426) the soil used for both maize and rice was a mix of 75% Metro 360 and 25% Turface MVP. Three biological replicates of maize and rice were used.

[0104] RNA samples from each segment were extracted as previously described (Wang, L. et al. (2011) PloS one 6: e26426). Total RNA was treated by DNase I (Roche, CA) before cDNA synthesis using Transcriptior® First Strand cDNA Synthesis Kit (Roche, CA) and the Anchored Oligo-dT primer. Two cDNA preparations were performed for each sample along with a negative control without reverse transcriptase.

[0105] One maize gene and one rice gene were chosen from 14 of the 30 clusters constructed by the model representing various combinations of gene expression levels and cluster sizes. In order to accurately represent the gene-centric RNA seq results, the selected sequences representing all transcript isoforms of the target gene. Primers were designed using Oligo 7®.

[0106] Two stable reference genes from maize (GRMZM2G157598) and rice (LOC_Os11g34450) samples were chosen based on the RNA-sequencing results from this and previous publications (Li, P. et al. (2010) Nat Genet 42: 1060-7; Wang, L. et al. (2011) PloS one 6: e26426). Control gene assays gave statistically stable expression across all segments and normalization factors were calculated via geometric averaging of the two control genes' expression levels using BestKeeper® software. Quantification of target gene expressions were calculated relative to the calibrator gene using advanced relative quantification in the LightCycler® 480 SW 1.5 software (Roche, CA). In each segment, the ratio of the expression level of the calibrator gene to the target gene was calculated using the software. The ratios were plotted as expression patterns along the developmental segments. Reactions were run with LightCycler® 480 SYBR Green I Master (Roche, CA) in a Roche LightCycler® 480 II Real-Time PCR machine using following program: 95° C. for 5 minutes, 45 cycles of 10 seconds at 95° C., 10 seconds at 60° C., and 10 seconds at 72° C., followed by 1 cycle of 95° C. for 5 seconds and 65° C. for one minute, samples were left at 95° C. without cooling. Three technical replicates of each sample were included in the qPCR experiment.

### Measurements of Maize and Rice Metabolites

[0107] Leaf samples from maize and rice plants used for metabolite measurements were grown at the same conditions as described previously (Li, P. et al. (2010) Nat Genet 42: 1060-7; Wang, L. et al. (2011) PloS one 6: e26426). Sections from 20-30 plants were pooled for each maize sample and 30-40 for each rice sample. Six biological samples were prepared for maize and four for rice. Frozen leaf material at −80° C. was ground to a fine powder using a cryogenic grinding robot prototype (Labman, Newcastle, UK). Sample sub-aliquots for the different analyses were either weighted by the robot or by hand using an analytical balance, and were constantly kept at freezing temperatures.

[0108] Secondary metabolite analysis by LC-MS was performed on HPLC system Surveyor (Thermo Finnigan, USA) coupled to Finnigan LTQ-XP system (Thermo Finnigan, USA) as described by Tohge and Fernie. All data were processed using Xcalibur 2.1 software (Thermo Fisher Scientific, Waltham, USA). The obtained data matrix of peak area was normalized using the internal standard (sinigrin, CAS: 3952-98-5). Metabolite identification and annotation were performed using metabolite databases and literature survey of Zea mays (Elliger, C. A. et al. (1980) Phytochemistry 19: 293-297; Snook, M. E. et al. (1995) Journal of Agricultural and Food Chemistry 43: 2740-2745) and monocot species (Tohge, T. et al. (2011) Plant Physiology 157: 1469-1482; Matsuda, F. et al. (2012) Plant Journal 70: 624-636). GC-MS metabolite profiling and carbon starvation experiments were conducted as described in Tohge et al. (Tohge, T. et al. (2011) Plant Physiology 157: 1469-1482). Enzyme activity measurements were conducted as previously described (Gibon, Y. et al. (2004) Plant Cell 16: 3304-3325; Sulpice, R. et al. (2010) Plant Cell 22: 2872-2893) using an established semi-robotized 96 well micro-titer plate platform.

### Example 9

### Expression of Transcription Factors in Planta

[0109] Eleven of the transcription factors were chosen for over expression in rice and the model C4 grass Setaria viridis (Table 4). These transcription factors were cloned into expression cassettes in binary vectors capable of maintenance in E. coli and A. tumefaciens. The two expression cassettes include the 2×355 and the ZmRbcS promoters, respectively. Additionally, all eleven transcription factors are cloned under the ZmCA1 promoter. Two TFs (GRMZM2G127537 and GRMZM2G124495) were cloned under the ZmPepC promoter. All binary vectors were transformed into A. tumefaciens strain LBA4404. The A. tumefaciens cells harboring the appropriate binary vectors are used for transformation of S. viridis and of O. sativa cells. Following transformation of plant cells, appropriate tissue culture techniques are used to regenerate fertile plants.

TABLE 4
Binary Vectors Cloned

| Construct | | | |
|---|---|---|---|
| ID | Promoter + 5′UTR | ORF | 3′UTR |
| 130576 | 2X 35S | GRMZM2G010929 | 35S poly A |
| 130577 | 2X 35S | GRMZM2G127537 | 35S poly A |
| 130578 | 2X 35S | GRMZM2G124495 | 35S poly A |
| 130579 | 2X 35S | GRMZM2G416184 | 35S poly A |
| 130678 | ZmRbcS | GRMZM2G141299 | ZmRbcS |
| 130679 | ZmRbcS | GRMZM2G169820 | ZmRbcS |
| 130680 | ZmRbcS | GRMZM2G159161 | ZmRbcS |
| 130681 | ZmRbcS | GRMZM2G019106 | ZmRbcS |
| 130682 | ZmRbcS | GRMZM2G119999 | ZmRbcS |
| 130683 | ZmRbcS | GRMZM2G177229 | ZmRbcS |
| 130684 | ZmRbcS | GRMZM2G061906 | ZmRbcS |
| 130685 | ZmRbcS | GRMZM2G130149 | ZmRbcS |
| 130694 | 2X 35S | GRMZM2G141299 | 35S poly A |
| 130695 | 2X 35S | GRMZM2G169820 | 35S poly A |
| 130696 | 2X 35S | GRMZM2G159161 | 35S poly A |
| 130697 | 2X 35S | GRMZM2G019106 | 35S poly A |
| 130698 | 2X 35S | GRMZM2G119999 | 35S poly A |
| 130699 | 2X 35S | GRMZM2G177229 | 35S poly A |
| 130700 | 2X 35S | GRMZM2G061906 | 35S poly A |
| 130701 | 2X 35S | GRMZM2G130149 | 35S poly A |
| 130785 | ZmRbcS | GRMZM2G010929 | ZmRbcS |
| 130786 | ZmRbcS | GRMZM2G127537 | ZmRbcS |
| 130787 | ZmRbcS | GRMZM2G124495 | ZmRbcS |
| 130788 | ZmRbcS | GRMZM2G416184 | ZmRbcS |
| 130790 | ZmPepC | GRMZM2G127537 | ZmPepC |
| 130791 | ZmPepC | GRMZM2G124495 | ZmPepC |
| 130686 | ZmCA | GRMZM2G141299 | ZmCA |
| 130687 | ZmCA | GRMZM2G169820 | ZmCA |
| 130688 | ZmCA | GRMZM2G159161 | ZmCA |
| 130689 | ZmCA | GRMZM2G019106 | ZmCA |
| 130690 | ZmCA | GRMZM2G119999 | ZmCA |
| 130691 | ZmCA | GRMZM2G177229 | ZmCA |
| 130692 | ZmCA | GRMZM2G061906 | ZmCA |
| 130693 | ZmCA | GRMZM2G130149 | ZmCA |
| 130792 | ZmCA | GRMZM2G416184 | ZmCA |

[0110] Tables 5 and 6 show the constructs that were used to transform S. viridis and O. sativa, respectively. Construct 130790 was successfully transformed into Setaria viridis. Gene copy number analysis via quantitative PCR was used to screen for single copy integration events. FAM-ZEN/Iowa Black FQ probe and primers (IDT DNA) were designed for the Setaria viridis PCK gene, previously shown to be single copy (Xu et al. (2013) Plant Mol Biol 83: 77-87). Quantitative PCR was performed using iQ Supermix Master Mix (Biorad Laboratories). Six of the ten events were shown to be single copy integrations.

TABLE 5
Constructs Transformed into Setaria viridis

| 6-Digit | | | |
|---|---|---|---|
| ID | Promoter + 5′UTR | ORF | 3′UTR |
| 130577 | 2X 35S | GRMZM2G127537 | 35S poly A |
| 130579 | 2X 35S | GRMZM2G416184 | 35S poly A |
| 130681 | ZmRbcS | GRMZM2G019106 | ZmRbcS |
| 130682 | ZmRbcS | GRMZM2G119999 | ZmRbcS |
| 130683 | ZmRbcS | GRMZM2G177229 | ZmRbcS |
| 130684 | ZmRbcS | GRMZM2G061906 | ZmRbcS |
| 130685 | ZmRbcS | GRMZM2G130149 | ZmRbcS |
| 130694 | 2X 35S | GRMZM2G141299 | 35S poly A |
| 130698 | 2X 35S | GRMZM2G119999 | 35S poly A |
| 130699 | 2X 35S | GRMZM2G177229 | 35S poly A |
| 130700 | 2X 35S | GRMZM2G061906 | 35S poly A |
| 130701 | 2X 35S | GRMZM2G130149 | 35S poly A |
| 130790 | ZmPepC | GRMZM2G127537 | ZmPepC |
| 130791 | ZmPepC | GRMZM2G124495 | ZmPepC |

TABLE 6
Constructs Transformed into O. sativa

| 6-Digit | | | |
|---|---|---|---|
| ID | Promoter + 5′UTR | ORF | 3′UTR |
| 130681 | ZmRbcS | GRMZM2G019106 | ZmRbcS |
| 130682 | ZmRbcS | GRMZM2G119999 | ZmRbcS |
| 130683 | ZmRbcS | GRMZM2G177229 | ZmRbcS |
| 130684 | ZmRbcS | GRMZM2G061906 | ZmRbcS |
| 130685 | ZmRbcS | GRMZM2G130149 | ZmRbcS |
| 130698 | 2X 35S | GRMZM2G119999 | 35S poly A |
| 130699 | 2X 35S | GRMZM2G177229 | 35S poly A |
| 130700 | 2X 35S | GRMZM2G061906 | 35S poly A |
| 130701 | 2X 35S | GRMZM2G130149 | 35S poly A |

We claim:

1. A method of improving plant growth by altering the expression of at least one nucleotide sequence encoding a transcription factor (TF), wherein said nucleotide sequence is selected from sequences having at least 95% identity to the sequences set forth in SEQ ID NOs: 3, 5, 7, 9, 11, 13, 15, 17, 19, 21, 23, 25, 27, 29, 31, 33, 35, 37, 39, 41, 43, 45, 47, 49, 51, 53, 55, 57, 59, 61, 63, 65, 67, 69, 71, 73, 75, 77, 79, 81, 83, 85, 87, 89, 91, 93, 95, 97, 99, 101, 103, 105, 107, 109, 111, 113, 115, 117, 119, 121, 123, 125, 127, 129, 131, 133, 135, 137, 139, 141, 143, 145, 147, 149, 151, 153, 155, 157, 159, 161, 163, 165, 167, 169, 171, 173, 175, 177, 179, 181, 183, 185, 187, 189, 191, 193, 195, 197, 199, 201, 203, 205, 207, 209, 211, 213, 215, 217, 219, 221, 223, 225, 227, 229, 231, 233, 235, 237, and SEQ ID NOS: 239, 241, 243, 245, 247, 249, 251, 253, 255, 257, 259, 261, 263, 265, 267, 269, 271, 273, 275, 277, 279, 281, 283, 285, 287, 289, 291, 293, 295, 297, 299, 301, 303, 305, 307, 309, 311, 313, 315, 317, 319, 321, 323, 325, 327, 329, 331, 333, 335, 337, 339, 341, 343, 345, 347, 349, 351, 353, 355, 357, 359, 361, 363, 365, 367, 369, 371, 373, 375, 377, 379, 381, 383, 385, 387, 389, 391, 393, 395, 397, 399, 401, 403, 405, 407, 409, 411, 413, 415, 417, 419, 421, 423, 425, 427, 429, 431, 433, 435, 437, 439, 441, 443, 445, 447, 449, 451, 453, 455, 457, 459, 461, 463, 465, 467, 469, 471, and 473, wherein said nucleotide sequence retains transcription factor activity.

2. The method of claim 1 wherein said at least one transcription factor is upregulated such that expression of the TF is increased relative to a control plant cell.

3. The method of claim 1 wherein said at least one transcription factor is downregulated such that expression of the TF is decreased relative to a control plant cell.

4. The method of claim 1, wherein said altering is achieved by the stable insertion of at least one expression construct comprising a promoter that drives expression in a plant, operably linked to at least one nucleotide sequence encoding at least one transcription factor.

5. The method of claim 4, wherein said promoter is a constitutive promoter.

6. The method of claim 4, wherein said promoter is a non-constitutive promoter.

7. A synthetic promoter operable in a plant cell comprising at least one of the cis-regulatory elements set forth in SEQ IDs No. 475-536 and 543 operably linked to at least one core promoter element operable in a plant cell.

8. The synthetic promoter of claim 7, wherein said promoter comprises the sequence set forth in SEQ ID NO: 1.

9. A method of expressing at least one sequence of interest in a plant by transforming said plant with a construct comprising the synthetic promoter of claim 7 operably linked to at least one coding sequence of interest.

10. The method of claim 1, wherein the plant of interest is a monocotyledonous plant.

11. The method of claim 1, wherein the plant of interest is a dicotyledonous plant.

12. An expression construct comprising a promoter that drives expression in a plant operably linked to a transcription factor (TF), wherein said nucleotide sequence is selected from sequences having at least 95% identity to the sequences set forth in SEQ ID NOs: 3, 5, 7, 9, 11, 13, 15, 17, 19, 21, 23, 25, 27, 29, 31, 33, 35, 37, 39, 41, 43, 45, 47, 49, 51, 53, 55, 57, 59, 61, 63, 65, 67, 69, 71, 73, 75, 77, 79, 81, 83, 85, 87, 89, 91, 93, 95, 97, 99, 101, 103, 105, 107, 109, 111, 113, 115, 117, 119, 121, 123, 125, 127, 129, 131, 133, 135, 137, 139, 141, 143, 145, 147, 149, 151, 153, 155, 157, 159, 161, 163, 165, 167, 169, 171, 173, 175, 177, 179, 181, 183, 185, 187, 189, 191, 193, 195, 197, 199, 201, 203, 205, 207, 209, 211, 213, 215, 217, 219, 221, 223, 225, 227, 229, 231, 233, 235, 237 and SEQ ID NOS: 239, 241, 243, 245, 247, 249, 251, 253, 255, 257, 259, 261, 263, 265, 267, 269, 271, 273, 275, 277, 279, 281, 283, 285, 287, 289, 291, 293, 295, 297, 299, 301, 303, 305, 307, 309, 311, 313, 315, 317, 319, 321, 323, 325, 327, 329, 331, 333, 335, 337, 339, 341, 343, 345, 347, 349, 351, 353, 355, 357, 359, 361, 363, 365, 367, 369, 371, 373, 375, 377, 379, 381, 383, 385, 387, 389, 391, 393, 395, 397, 399, 401, 403, 405, 407, 409, 411, 413, 415, 417, 419, 421, 423, 425, 427, 429, 431, 433, 435, 437, 439, 441, 443, 445, 447, 449, 451, 453, 455, 457, 459, 461, 463, 465, 467, 469, 471, and 473, wherein said nucleotide sequence retains transcription factor activity.

13. A plant transformed with the expression construct of claim 12.

14. Transformed seed of the plant of claim 13.

15. The plant of claim 13, wherein said plant is a monocotyledonous plant.

16. The plant of claim 13, wherein said plant is a dicotyledonous plant.

17. The expression construct of claim 12, further comprising at least one nucleotide sequence of interest.

18. An expression construct comprising a synthetic promoter operable in a plant cell comprising at least one of the cis-regulatory elements set forth in SEQ IDs No. 475-536 and 543 operably linked to at least one core promoter element operable in a plant, wherein said synthetic promoter is operably linked to a nucleotide sequence.

19. The expression construct of claim 18, wherein said nucleotide sequence is a coding sequence.

20. A plant transformed with the expression construct of claim 18.

21. Transformed seed of the plant of claim 20.

22. The plant of claim 20, wherein said plant is a monocotyledonous plant.

23. The plant of claim 20, wherein said plant is a dicotyledonous plant.

The application's sequence listing, which the Patent Office published only in electronic form, follows.

SEQUENCE LISTING (553 sequences)

SEQ ID NO: 1 - DNA, 423 bp, Artificial Sequence
  synthetic 4xRGCGR Promoter; derived from Sorghum bicolor
gaagcgagtggcgcgctggcggatgaggcggcgagtggcccggatgcaccggcgcaggcgagcgaagcgagtggcgcgctggcggatgaggcggcgagtggcccggatgcaccggcgcaggcgagcgaagcgagtggcgcgctggcggatgaggcggcgagtggcccggatgcaccggcgcaggcgagcgaagcgagtggcgcgctggcggatgaggcggcgagtggcccggatgcaccggcgcaggcgagccgcacgccgccgcccgccgcggcgctcgcgcgcggaccgctgccgcctgccgccacacaatgcgagcgcgcgcgcacacacacacacaccacccgggcgggggggctgtagtagtaacggccttgtcttgtcggcacgcgcgcgtccgtgtgtataaggaggcaggcccgc

SEQ ID NO: 2 - DNA, 1176 bp, Artificial Sequence
  Codon-optimized SBPase open reading frame from Zea mays
atggagaccgtggccgcctccggctacgccaggggcgccgccaccaggtccccggcctgctgcgccgccatgtccttctcccagtcctacaggccgaaggccgccaggccgccgaccaccttctacggcgagtccgtgagggccaacaccgccaggaccctcccgggcaggcagtccaaggccgcctccagggccgccctcaccaccaggtgcgccatcggcgactccctcgaggagttcctcaccaaggccaccccggacaagaacctcatcaggctcctcatctgcatgggcgaggccatgaggaccatcgccttcaaggtgaggaccgcctcctgcggcggcaccgcctgcgtgaactccttcggcgacgagcagctcgccgtggacatgctcgccgacaagctcctcttcgaggccctcgagtactcccacgtgtgcaagtacgcctgctccgaggaggtgccggagctccaggacatgggcggcccggtggacggcggcttctccgtggccttcgacccgctcgacggctcctccatcgtggacaccaacttcaccgtgggcaccatcttcggcgtgtggccgggcgacaagctcaccggcgtgaccggcggcgaccaggtggccgccgccatgggcatctacggcccgaggaccaccttcgtggtggccctcaaggactgcccgggcacccacgagttcctcctcctcgacgagggcaagtggcagcacgtgaaggacaccaccaccatcggcgagggcaagatgttctccccgggcaacctcagggccaccttcgacaacccggactacgacaagctcgtgaactactacgtgaaggagaagtacaccctcaggtacaccggcggcatggtgccggacgtgaaccagatcatcgtgaaggagaagggcatcttcaccaacgtgacctccccgaccgccaaggccaagctcaggctcctcttcgaggtggccccgctcggcttcctcatcgagaaggccggcggccactcctccgacggcaagcagtccgtgctcgacaaggtgatcaccgtgctcgacgagaggacccaggtggcctacggctccaagaacgagatcatcaggttcgaggagaccctctacggctcctccaggctcgccgccggcgccaccgtgggcgccaccgtgtga

SEQ ID NO: 3 - DNA, 714 bp, Zea mays
  ref <308>: DATABASE ACCESSION NUMBER: GRMZM2G061906
atgagctgcgcggggcaggccggcgggtggctgctcgactacgcgctggtggaggaggagatccagggctccgagttcatctacatggtcgacgacccggccgtctccagcgtgatactggggtttgatgctcccaggaaggaggacggcgtccaggacaaccccggcgccaagaagagatcccggccggagtccagcgcgccacccggcaccaaggcttgccgtgagaagctccggcgagacaggctcaacgaaaggttcaacgagctctgtgccatcttggaacccggcaagccacccaaggccgacaaagtcgctatcctaagcgacgctgcccgtctcctgaaccagctgcagggcgaggcccagaagcttaagcaatcgaacgaatcgctccaggagtccatcaagagtcttaaggctgagaagtccgagctgcgagacgagaagacgaggctcaaggctgagaaggagaggttggagcagatgctcaagggcgtcgtcagccacgccgcggtggctgctccggggcccttcgtcccgcaccctgctgcggtcgctccatctttccaccaccacccggcggcgtttgctcaggctggaaagttcgtcccgtaccccagctacccgccgccggctgcgttctggcagtggataccgccgacgtccctcgacacgaccaaggaccccgcacactggccgccggtcgcctag

SEQ ID NO: 4 - protein, 237 aa, Zea mays
  ref <308>: DATABASE ACCESSION NUMBER: GRMZM2G061906
MSCAGQAGGWLLDYALVEEEIQGSEFIYMVDDPAVSSVILGFDAPRKEDGVQDNPGAKKRSRPESSAPPGTKACREKLRRDRLNERFNELCAILEPGKPPKADKVAILSDAARLLNQLQGEAQKLKQSNESLQESIKSLKAEKSELRDEKTRLKAEKERLEQMLKGVVSHAAVAAPGPFVPHPAAVAPSFHHHPAAFAQAGKFVPYPSYPPPAAFWQWIPPTSLDTTKDPAHWPPVA

SEQ ID NO: 5 - DNA, 852 bp, Zea mays
  ref <308>: DATABASE ACCESSION NUMBER: GRMZM2G166946
atgataaggggcggcaaccaccagcaggcggcggacgtcgaggaggagctagcccggaacagcaggcacgccgccgccgtggcgacgtcgcggcaatggtcggcgcagacggagtcgcgcatcgtgcgcgtctcccgcgtcttcggcggcaaggaccgccacagcaaggtgaagaccgtcaagggcctgcgcgaccggcgggtgcgcctctccgtgccgacggcgatccagctctacgacctgcaggaccgcctcggcctcaaccagcctagcaaggtcgtcgactggctgctcaacgccgcgcgccacgagatcgacaagctgccgccgctgcagttcccgccgcaggacctcatggttgggcacctgacgccccacaacatgccgctgatggtgcacgacgagaagttcggacacctcgccgcggccgcggcgctcgcgagcggcggcggcggcggcgccaaggtcagccagcagggcaacgtcgtcgacgtcgacgggaccggagcccaccacttggtggggaggttccccggcggctaccaccggttcatggagctgaacagcgcgttgggcatggtcagtggcgcaatggcgccgccgtataacaacaactacaccggagaggcatggaataacagcggcggcggcgtgcatgacagcggctcgccgcagatcgtcgccgcagccgctcaccactcgccgttcccatcgttgctctccttggctccacgtccgcatcagctggcgttctactcctcggaagctgatcagcagtttcaggtggagaaccttggctcgcaaagcctgtccttgagctcggcgagggcttaccatgatcaggctagctag

SEQ ID NO: 6 - protein, 283 aa, Zea mays
  ref <308>: DATABASE ACCESSION NUMBER: GRMZM2G166946
MIRGGNHQQAADVEEELARNSRHAAAVATSRQWSAQTESRIVRVSRVFGGKDRHSKVKTVKGLRDRRVRLSVPTAIQLYDLQDRLGLNQPSKVVDWLLNAARHEIDKLPPLQFPPQDLMVGHLTPHNMPLMVHDEKFGHLAAAAALASGGGGGAKVSQQGNVVDVDGTGAHHLVGRFPGGYHRFMELNSALGMVSGAMAPPYNNNYTGEAWNNSGGGVHDSGSPQIVAAAAHHSPFPSLLSLAPRPHQLAFYSSEADQQFQVENLGSQSLSLSSARAYHDQAS

SEQ ID NO: 7 - DNA, 885 bp, Zea mays
  ref <308>: DATABASE ACCESSION NUMBER: GRMZM2G119999
atgaagaggccgaccagcagaggttcttcaatggtcagcgggcaagcaaccacagatctacaagaagatagctgcaggtccatggagccgcacggagtggacggcgatgctacggccgcggctgagcgcgacgacgtggacgccggggcgtacgacgaggaggtggacgaagaagaggagctcgcagggtcccgcggcggcctcggggagaagaagcggcggctggcggcggatcaggtgcgcgccctggagcggagcttcgaggtagacaacaagctggacccagagcgcaaggcccggatcgcgcgcgacctcagcctccacccgcgccaggtcgccgtctggtttcagaaccgccgcgcgcgctggaagaccaagcagatcgagcgcgacttcgccgcgctccgcgtgcgccacgacgcactccgcgtcgagtgcgacgcgctccgccgcgacaaagacgccctcgccgccgagataaaggagctgaggggcatggtggaaaagcagatggaggtgaagctggagtccgcggcggaggagctgctgccggtggcgacgaggtcagcagcagcagccgctgtgtataacaaggacgggtcgacggacagcgactcgagcgccgtgttcaacgaggaggcgtcgccctacccttactccggcgcggccttagaccatcagcagcagcaagaaaccagccacccgctgggcttcacgggtttcacctccttcttgacgtcctctttcccttccgtataccatggggattcgcatttggaccaggaagcggacggcttcttcagcgccgccgccgccggcgacggattcttcgccgaggagcagagcgcaggcatcggcagctggtacggcggtgagggttggtag

SEQ ID NO: 8 - protein, 294 aa, Zea mays
  ref <308>: DATABASE ACCESSION NUMBER: GRMZM2G119999
MKRPTSRGSSMVSGQATTDLQEDSCRSMEPHGVDGDATAAAERDDVDAGAYDEEVDEEEELAGSRGGLGEKKRRLAADQVRALERSFEVDNKLDPERKARIARDLSLHPRQVAVWFQNRRARWKTKQIERDFAALRVRHDALRVECDALRRDKDALAAEIKELRGMVEKQMEVKLESAAEELLPVATRSAAAAAVYNKDGSTDSDSSAVFNEEASPYPYSGAALDHQQQQETSHPLGFTGFTSFLTSSFPSVYHGDSHLDQEADGFFSAAAAGDGFFAEEQSAGIGSWYGGEGW

SEQ ID NO: 9 - DNA, 1242 bp, Zea mays
  ref <308>: DATABASE ACCESSION NUMBER: GRMZM2G114137
atgacgagcgccggagcggcgacaggcgccgcgctaggcgcgcggacggcgcggtcctgcgacggctgcatgaggcggcgggcgcggtggcactgccccgccgacgacgccttcttgtgccagacctgcgacgtctccgtgcactcggcgaacccgctcgcgcgccgccaccaccgcgtccgcctcccctctgcgtcctgctcctccccaccgcgcgacccggacgcgccaacgtggctccacggcctcaagcgacggccacgcacgccgcggtccaagccaggggggagcaagagcaacaagcatgaggcgactcccagctttatcgccgcggctgcgtcgtcggcagcggtccccgacctcgaggcggaggagtccggctccggtatcctgggcggtaacgacgaccaccacgggttcctgcaggatgacgacgaagaccttctgtaccgcgtgccggtgttcgaccctatgctcgccgagttctacaaccccgtggccgacgagggggagcagaagccggcctgcagcctgctgatgccgtctctcgcggaaacatcgccggagttcgcctccggcggctcggcggaggcggacgggctctccgtgtcgttccacgtcccggacatggagctcgctagcttcgccgcggacatggagagcctcctcatgggagtcgacgacgacgggtttgactgtttgggtttcttggacgaagagaaacctcaggtgaacgcggacttggacgccatagtagcgccggcgcctgaaccagaggacaagaaacggaagcggccggagatgatactcaagctcaactacgaaggcgtcatcgcctcatgggtccgtgacggcggctcgccgtggttccacggcgagcgtcctcacctcgactgtcacgagctatggtcggacgacttcacgacgggtagccgggaactcctcggcggagccgtgacaccggtgaccggtggcgagcgtgaggcgcgggtgtcgcgatacagggagaagcggcggacgcgactgttcgccaagaagatccggtacgaggtgcgcaagctcaacgccgagaagcggccgcggatgaagggtcggttcgtgaagcgcgccacgcttccgccgctgccaaggccgccgccgccgcagcagcagcagcagcagaagcagctgccacgcgcaccgccacacgtgggcatggtgctcccaccacctccggtatcgaacgggcgcttgtggttttga

SEQ ID NO: 10 - protein, 413 aa, Zea mays
  ref <308>: DATABASE ACCESSION NUMBER: GRMZM2G114137
MTSAGAATGAALGARTARSCDGCMRRRARWHCPADDAFLCQTCDVSVHSANPLARRHHRVRLPSASCSSPPRDPDAPTWLHGLKRRPRTPRSKPGGSKSNKHEATPSFIAAAASSAAVPDLEAEESGSGILGGNDDHHGFLQDDDEDLLYRVPVFDPMLAEFYNPVADEGEQKPACSLLMPSLAETSPEFASGGSAEADGLSVSFHVPDMELASFAADMESLLMGVDDDGFDCLGFLDEEKPQVNADLDAIVAPAPEPEDKKRKRPEMILKLNYEGVIASWVRDGGSPWFHGERPHLDCHELWSDDFTTGSRELLGGAVTPVTGGEREARVSRYREKRRTRLFAKKIRYEVRKLNAEKRPRMKGRFVKRATLPPLPRPPPPQQQQQQKQLPRAPPHVGMVLPPPPVSNGRLWF

SEQ ID NO: 11 - DNA, 864 bp, Zea mays
  ref <308>: DATABASE ACCESSION NUMBER: GRMZM2G177229
atggctgagcatcttgcgtccatctttggcacggagaaggaccgcgtgaactgccccttctacttcaagatcggcgcatgccgccacggcgaccggtgctcccgcctgcacaacaagccttccatctccccgacgctgctgctctgcaacatgtaccagcggccggacatgatcaccccgggcgtggacgcgcagggcaaccccatcgacccggagcggatccaggaggacttcgaggacttctacgaggacatcttcgtggagctgagcaagcacggcgagatcgagagcctccacgtctgcgacaacctcgcggaccacatgatcgggaacgtgtacgtggagttccgcgaggaggagcaggcggcccgcgccctgcaggcgctgcagggccgctactactcgggccgacccatcatcgccgagttctcgccggtgacggacttccgggaggccacctgccgccagttcgaggagcacagctgcaaccgcggcggatactgcaactttatgcacgtcaagcaggtcggccgggacctgcggcggaagctgtttggccacctgcatcgctccctccggagccacagccgaggcagccgcagcccgagcccataccgccgccgcggtagctcgtccaggtccagggaccgcgacgattaccacgactactactaccactactaccgtagtggcagtggcagccgcaggagcagcgagagacaccgcagccacgacagcgacgggagccgccgtcgacgcgggcggtcgaggagccggagccggagcccggtgagggaaggcagcgaggagcggagggcaaagattgagcagtggaaccgcgagcgggaggcagctcaggtgtaa

SEQ ID NO: 12 - protein, 287 aa, Zea mays
  ref <308>: DATABASE ACCESSION NUMBER: GRMZM2G177229
MAEHLASIFGTEKDRVNCPFYFKIGACRHGDRCSRLHNKPSISPTLLLCNMYQRPDMITPGVDAQGNPIDPERIQEDFEDFYEDIFVELSKHGEIESLHVCDNLADHMIGNVYVEFREEEQAARALQALQGRYYSGRPIIAEFSPVTDFREATCRQFEEHSCNRGGYCNFMHVKQVGRDLRRKLFGHLHRSLRSHSRGSRSPSPYRRRGSSSRSRDRDDYHDYYYHYYRSGSGSRRSSERHRSHDSDGSRRRRGRSRSRSRSPVREGSEERRAKIEQWNREREAAQV

SEQ ID NO: 13 - DNA, 1017 bp, Zea mays
  ref <308>: DATABASE ACCESSION NUMBER: GRMZM2G114850
atgtcgatgagcttcttgagcatggtggaggcggagctgccgccggggttccggttccacccgagggacgacgagctcatctgcgactacctcgcgcccaagctcggcgccaagcccggcttctccggctgccgcccgcccatggtcgacgtcgacctcaacaaggtcgagccatgggacctccccgtggcggcgtcggtggggccgcgggagtggtacttcttcagcctcaaggaccgcaagtacgcgacggggcagcggacgaaccgggccacggtgtccgggtactggaaggcgacggggaaggaccgacccgtggtggcggcgcggcgaggcgcgctggtggggatgcgcaagacgctcgtgttctaccaggggagggcgcccaagggcaggaagacggagtgggtgatgcacgagtacaggatggagccagctgctcctcttcttgatcaccaaccctcctcatccaactccaaggatgaagattgggtgctgtgcagagtcatctgcaagaagaaactggcagcaggaggccgcgcaggagggggcagctcgaggagcctggtcgccagcaacggcggccgcgagaccgcgccagccaccccgccgccgccgccgctgccacctcgcatggacacggacgccaccctagcacagctccaggccgccatgcacgccaccgccggcgcgctcgagcaggtgccctgcttctccagcttcaacaacaacactgccagctctagagctgctgccgcagcagcagcagcgcagccatgctacctgcccagcatggccacaggcggcagccacggcacgacgagctactacctagaccacgcgatgctgccgcctgagctgggtggctgcttcgatcctctccacggcgacaagaagctgctcaaggcggtgctgggccagctcggcggcgacgcggtggcgccgggcctgagcctgcagcacgagatggccgcgggcgctgtcgtcgcttcatccgcttggatgaatcacttctag

SEQ ID NO: 14 - protein, 338 aa, Zea mays
  ref <308>: DATABASE ACCESSION NUMBER: GRMZM2G114850
MSMSFLSMVEAELPPGFRFHPRDDELICDYLAPKLGAKPGFSGCRPPMVDVDLNKVEPWDLPVAASVGPREWYFFSLKDRKYATGQRTNRATVSGYWKATGKDRPVVAARRGALVGMRKTLVFYQGRAPKGRKTEWVMHEYRMEPAAPLLDHQPSSSNSKDEDWVLCRVICKKKLAAGGRAGGGSSRSLVASNGGRETAPATPPPPPLPPRMDTDATLAQLQAAMHATAGALEQVPCFSSFNNNTASSRAAAAAAAAQPCYLPSMATGGSHGTTSYYLDHAMLPPELGGCFDPLHGDKKLLKAVLGQLGGDAVAPGLSLQHEMAAGAVVASSAWMNHF

SEQ ID NO: 15 - DNA, 996 bp, Zea mays
  ref <308>: DATABASE ACCESSION NUMBER: GRMZM2G143204
atggccggcgccgccggtgacaggtcggaggaggacgtcggcgccgactggccgttcggtggcgtcgacgccttcacggagtactcatcctttttcgcggagcccggctggccgggcggcctagccggggaactcatcccggtgctggatctgcccgaggcagcagcaccgctgcccgcccaactgtccacggagccatcggaggagcctgcgcccgccaggtcgggggacgccggcgcgtcgtcgagctcgagcggggacggcgccgcgccggggaacggcgacggcgacgacgatcggaaggcggcgccggccgccgaggcagcgggtaggaaaccggcggcgaagaaggggcagaagcgggcgcggcagccgcggttcgcgttcatgaccaagaccgagctcgatcacctcgacgacggctatagatggaggaagtatggccagaaagctgtcaagaacagccctttcccaaggagttactacaggtgcaccaacagcaaatgcacagtgaagaagcgcgtggagaggtcctccgacgacccctccgtggtcatcaccacctacgagggccagcactgccacagcatcggtccattccagcgcggcggcggcggaggcgcagccgcggcgcggtaccacagcgcggcggccgtcgcgctggcggagcaaatgtattcgtcgtcgacgacgtcgtcgttcatcccagcagcgcggcagcagctcttcagcttgccgccgttgcacccgcagagctccccgccgtcctcggagacgacgccgccgccggtcgttagctcggtgactactacatcttttcagcgtgctaacgacggcgacgagctgtggcggacaggcacaggctacggctccggggtgtccgtggcgcagtcgccgtcaacgccaccatcagtgcctccgccggtcgtttcggttcagaaggcggggctgctggacgacatggtgccccatggtgtaaggcatggcaccccatga

SEQ ID NO: 16 - protein, 331 aa, Zea mays
  ref <308>: DATABASE ACCESSION NUMBER: GRMZM2G143204
MAGAAGDRSEEDVGADWPFGGVDAFTEYSSFFAEPGWPGGLAGELIPVLDLPEAAAPLPAQLSTEPSEEPAPARSGDAGASSSSSGDGAAPGNGDGDDDRKAAPAAEAAGRKPAAKKGQKRARQPRFAFMTKTELDHLDDGYRWRKYGQKAVKNSPFPRSYYRCTNSKCTVKKRVERSSDDPSVVITTYEGQHCHSIGPFQRGGGGGAAAARYHSAAAVALAEQMYSSSTTSSFIPAARQQLFSLPPLHPQSSPPSSETTPPPVVSSVTTTSFQRANDGDELWRTGTGYGSGVSVAQSPSTPPSVPPPVVSVQKAGLLDDMVPHGVRHGTP

SEQ ID NO: 17 - DNA, 852 bp, Zea mays
  ref <308>: DATABASE ACCESSION NUMBER: GRMZM2G363052
atgcggccctcggtgcagaaggtccgcattttctgttctgatcctgatgctactgactcatctgatgatgaagatggccagatcatcgcagtgaagaaaatggttatggagatactagtcccagtgacaaactcgaagacatctaatagtctgaagacccttgtgccgtgtggagcaaaggacctggaggtttcagagaagaagggtaaatcaagcaggttccgtggcgtgcgcaggcgacgctggggtcgatgggcagccgagattcgtgatcctgtgagaaaaaccaggaagtggattggctcgtatgactctgaggaggctgctgctgcggcatatcaggcgtatgcaaaacagatccgtgaagagttgctagccatcaagaaccaacggtctgtatcagaacgtgcagctctatcaagttcatcctcggtttcttgcgtatcttcgtctcccccatgtgagcagacagggcatgaaccgcagactagagtgctcgtggagaaagatcctgagcctgtagatgaagtctttctgaacttctctctcacacccaaggggatttcaatggacgatttgttaggacggatagatgagattcctgtttgtgacgaccctgtcagcccaactgatgagcttccacttgacaatttcacgagcctggaagatgcattcccgatcagcgatttcatcggttcaagagatgagcatctgtatgagcactatattggcctggctgacattagccacctgcctcttccaatggatgatccagctttcaatctggatgcagagcttgattggagtgggtttgacttcgctgcgattgaaggtgaacttgatgtcctttga

SEQ ID NO: 18 - protein, 283 aa, Zea mays
  ref <308>: DATABASE ACCESSION NUMBER: GRMZM2G363052
MRPSVQKVRIFCSDPDATDSSDDEDGQIIAVKKMVMEILVPVTNSKTSNSLKTLVPCGAKDLEVSEKKGKSSRFRGVRRRRWGRWAAEIRDPVRKTRKWIGSYDSEEAAAAAYQAYAKQIREELLAIKNQRSVSERAALSSSSSVSCVSSSPPCEQTGHEPQTRVLVEKDPEPVDEVFLNFSLTPKGISMDDLLGRIDEIPVCDDPVSPTDELPLDNFTSLEDAFPISDFIGSRDEHLYEHYIGLADISHLPLPMDDPAFNLDAELDWSGFDFAAIEGELDVL

SEQ ID NO: 19 - DNA, 1380 bp, Zea mays
  ref <308>: DATABASE ACCESSION NUMBER: GRMZM2G087804
atgcttgaggtgtcgacgctgcgcggccctactagcagcggcagcaaggcggagcagcactgcggcggcggcggcggcttcgtcggcgaccaccatgtggtgttcccgacgtccggcgactgcttcgccatggtggacgacaacctcctggactacatcgacttcagctgcgacgtgcccttcttcgacgctgacggggacatcctccccgacctggaggtagacaccacggagctcctcgccgagttctcgtccacccctcctgcggacgacctgctggcagtggcagtattcggcgccgacgaccagccggcggcggcagtagcacaagagaagccgtcgtcgtcgttggagcaaacatgtggtgacgacaaaggtgtagcagtagccgccgccagaagaaagctgcagacgacgacgacgacgacgacgacggaggaggaggattcttctcctgccgggtccggggccaacaagtcgtcggcgtcggcagagggccacagcagcaagaagaagtcggcgggcaagaactccaacggcggcaagcgcaaggtggactggacgccggagctgcaccggcggttcgtgcaggcggtggagcagctgggcatcgacaaggccgtgccgtccaggatcctggagatcatgggcacggactgcctcacaaggcacaacattgccagccacctccagaagtaccggtcgcacagaaagcacctgatggcgcgggaggcggaggccgccacctgggcgcagaagcgccacatgtacgcgccgccagctccaaggacgacgacgacgacggacgccgccaggccgccgtgggtggtgccgacgaccatcgggttcccgccgccgcgcttctgccgcccgctgcacgtgtggggccacccgccgccgcacgccgccgcggctgaagcagcagcggcgactcccatgctgcccgtgtggccgcgtcacctggcgccgccccggcacctggcgccgtgggcgcacccgacgccggtggacccggcgttctggcaccagcagtacagcgctgccaggaaatggggcccacaggcagccgccgtgacgcaagggacgccatgcgtgccgctgccgaggtttccggtgcctcaccccatctacagcagaccggcgatggtacctccgccgccaagcaccaccaagctagctcaactgcatctggagctccaagcgcacccgtccaaggagagcatcgacgcagccatcggagatgttttagtgaagccatggctgccgcttccactggggctcaagccgccgtcgctcgacagcgtcatgtcggagctgcacaagcaaggcgtaccaaaaatcccaccggcggctgccaccaccaccggcgccaccggatga

SEQ ID NO: 20 - protein, 459 aa, Zea mays
  ref <308>: DATABASE ACCESSION NUMBER: GRMZM2G087804
MLEVSTLRGPTSSGSKAEQHCGGGGGFVGDHHVVFPTSGDCFAMVDDNLLDYIDFSCDVPFFDADGDILPDLEVDTTELLAEFSSTPPADDLLAVAVFGADDQPAAAVAQEKPSSSLEQTCGDDKGVAVAAARRKLQTTTTTTTTEEEDSSPAGSGANKSSASAEGHSSKKKSAGKNSNGGKRKVDWTPELHRRFVQAVEQLGIDKAVPSRILEIMGTDCLTRHNIASHLQKYRSHRKHLMAREAEAATWAQKRHMYAPPAPRTTTTTDAARPPWVVPTTIGFPPPRFCRPLHVWGHPPPHAAAAEAAAATPMLPVWPRHLAPPRHLAPWAHPTPVDPAFWHQQYSAARKWGPQAAAVTQGTPCVPLPRFPVPHPIYSRPAMVPPPPSTTKLAQLHLELQAHPSKESIDAAIGDVLVKPWLPLPLGLKPPSLDSVMSELHKQGVPKIPPAAATTTGATG

SEQ ID NO: 21 - DNA, 1362 bp, Zea mays
  ref <308>: DATABASE ACCESSION NUMBER: GRMZM2G024976
atgagcgagctggtgcgggcggcggctccggcagctgcggaggaggagaagaaggccgtcgcggctgtgactgtggtggcgaaaggaaaagagaaggcggaggtgacgccgaccgtggaggcctcatcggtcggcgacagggggaggttcgtggcctacccgtcgcgggtggcggagcacacggacgtggtggcggacgccgcgcgcttcagggcggcgctcgaggggctgcacacgcacatgggcaccaggctcaaggtgccgatcattggagggaaagatttggatcttcatcagctatataaggaggtcacatcacggggcggtattgacaaggtgaaggcagagaatagatggagagaagtgactgcatcatttattttccctgccactgcgacaaatgcttcttttatgctgaagaaatactatatgtcactcttatatcattttgagcagctatacttctttagagtgcaaggctggcatcaacaagaaatagattccagaatgaattcttccattgaaattaaaaccgaaggccaagcttaccacaaaagaaaaaggggcatcaacacatcttcagatccagcttcgtcttcagataatgttgacgtagatgtgatagttgatggcaaatttgaacatggctacatagtgactgttattatgggatcgaaatccactaaagcaatcctctataattgcactgaagaacctgctttgccaactccggagccacctgttgcaaataacagcactggtttgaagggtgtacgtcgccgaagacgacgtaggaagaagctaagtacaacggatcccaggcaccccaaaccaaacaggagtggctataatttcttcttccaggatcaacatagaattcttaagccacaatatcctgcacaagacagactgatcagtaaaatgattggtgaacgatggaacaatctaagtcctgaagataaagctgtatatcagcaaagaggtgtagaggataaggagcgataccggacccagttggctgcttataaagaactgaggacaggccaacctatcagcaatgctgtgcctatccaacagaggctccctctgacagaagtgacgattgatgaagtagactccaaggtgagccaagatgatatgctgctgtcaaaccaagggtacagcagtagtgatgaaagtgaccattcaggagagaaaaatgtagaagacgagctcaacactgaaacatcccctgaggtgagcatggaaacaactggttctcctggacaccctgatccctctcgagatggggaccactttgagttgcggcggagagaaaaccccaaggcagatgagaaagataatgcaccacctgattcatga

SEQ ID NO: 22 - protein, 453 aa, Zea mays
  ref <308>: DATABASE ACCESSION NUMBER: GRMZM2G024976
MSELVRAAAPAAAEEEKKAVAAVTVVAKGKEKAEVTPTVEASSVGDRGRFVAYPSRVAEHTDVVADAARFRAALEGLHTHMGTRLKVPIIGGKDLDLHQLYKEVTSRGGIDKVKAENRWREVTASFIFPATATNASFMLKKYYMSLLYHFEQLYFFRVQGWHQQEIDSRMNSSIEIKTEGQAYHKRKRGINTSSDPASSSDNVDVDVIVDGKFEHGYIVTVIMGSKSTKAILYNCTEEPALPTPEPPVANNSTGLKGVRRRRRRRKKLSTTDPRHPKPNRSGYNFFFQDQHRILKPQYPAQDRLISKMIGERWNNLSPEDKAVYQQRGVEDKERYRTQLAAYKELRTGQPISNAVPIQQRLPLTEVTIDEVDSKVSQDDMLLSNQGYSSSDESDHSGEKNVEDELNTETSPEVSMETTGSPGHPDPSRDGDHFELRRRENPKADEKDNAPPDS

SEQ ID NO: 23 - DNA, 1245 bp, Zea mays
  ref <308>: DATABASE ACCESSION NUMBER: GRMZM2G701218
atgtatcaccaacatcagggcctgagtgagctcttcaccacgaggacatcctttccaatggagcagcatctgtttttgcgtggaggaaatgcccaaggagattctgggctggttctctcaactgatgctaaaccaaggctcaaatggacacctgagttacatcagcgatttgtagatgcagtcaatcagttaggtggagcagagaaagctactccaaaaacagtcatgaggctcatgggaatcccaggactcaccttgtaccatttgaaaagccatctccagaaatacaggctgagcaagaacctccaagctcaagcaaatgtcagtacatcaaagaatgccataggatgtacatccattgctgataggattcctggaacaagcgctgcaacaatgagcagtacaaatgtcgttccgcaggcagagaagactattcaaattggtgaagcacttcagatgcaaattgaggttcagagacagttaaatgaacaacttgaggtgcaaaggcatctacaactacgaattgaagcacaagggaaatacctacaagcagttttggagcaggcacaagaaacacttggaaaacagaatttgggtcctgcgaacctggaagatgcaaaaataaaaatatcacagttagtttcacaagtatcaactgaatgcttcagtaatgcaattacagatgtaaaaggaagttcaagtgtgcataggttagagcccagacaaatccagtttgttgaaagttcaacaaatagttatttgtctgtggccgaaggattcatcaaggagcagagactacagcaccaacagcaccatggagtactaaaagcacatgatggtagttcattattttgcagaaaaagaccgcatgaacatgagacccagtttgcccttaacagaagcctaagtgagcgtaggatggcacatttgcagaatgatgaacaatacagtaaagcagagtttgggtatgaaagtgacacagagatagtgcatgagtatactgcaccccaaaatggtggaggtagcaccaccagttcggcatcaggaagcaaagtagatgcggagaagctatatctagaagagcaaaagtgtgcaagacaggtcgctgaataccccagagaaagcaagctaatagattttgagaattcgtgttcagggaagaaacttgatctgaacacccataatgtagatgacactgatcaagcttacagacattttgacttgaatgatttcagctggagctga

SEQ ID NO: 24 - protein, 414 aa, Zea mays
  ref <308>: DATABASE ACCESSION NUMBER: GRMZM2G701218
MYHQHQGLSELFTTRTSFPMEQHLFLRGGNAQGDSGLVLSTDAKPRLKWTPELHQRFVDAVNQLGGAEKATPKTVMRLMGIPGLTLYHLKSHLQKYRLSKNLQAQANVSTSKNAIGCTSIADRIPGTSAATMSSTNVVPQAEKTIQIGEALQMQIEVQRQLNEQLEVQRHLQLRIEAQGKYLQAVLEQAQETLGKQNLGPANLEDAKIKISQLVSQVSTECFSNAITDVKGSSSVHRLEPRQIQFVESSTNSYLSVAEGFIKEQRLQHQQHHGVLKAHDGSSLFCRKRPHEHETQFALNRSLSERRMAHLQNDEQYSKAEFGYESDTEIVHEYTAPQNGGGSTTSSASGSKVDAEKLYLEEQKCARQVAEYPRESKLIDFENSCSGKKLDLNTHNVDDTDQAYRHFDLNDFSWS

SEQ ID NO: 25 - DNA, 1152 bp, Zea mays
  ref <308>: DATABASE ACCESSION NUMBER: GRMZM2G372297
atggcgttgctgagcccgcgcgtgccgcggctgccgccctccaccttcacctccgctgccggtgcccggtgctttggccccgccgcgaggtgccaggcgacggcggcgggcggcgtggcggccgcggggcccccgtcgtcggagctggaggccatccggtggggcagcgccaagctgcagggcgctcgcgacgagatggaggatgaggtcttgctccgcccgggctccctcctcgatggcttctccttcgccgccgtcttggatggacacgccggcttctccgccgtccagttcctcagggatgagctgtacaaggagtgcgcagctgcgttggacggcggcgcggtgctcagcactaagaatctcgacgctatcacggcctccatccagcgtgccttcgccgctgtcgacgccaagctctccacctggctcgagcaaacggacaaggacgactctggtgctacggccactgtcatgtttctcaggagcgatgtgcttgttgtctcgcacattggggactcttgcttggtgatatcacgtggtggaagatctgaagctttgactggctctcatcgaccatatgggaacaacaaaacgtcccttgaagaggtcaagaggatcagagcagcaggtggatggattgttgatgggcgcatatgtggagacatatctgtatctcgtgcttttggggacataagatttaagacacaaaagaatgaaatgctggtgaaaggagttaaacaaggaaggtggactgataagttcatctcacgaatacaatttaaagatgatatagtaatctcgtcacctgatgtatctctggtagagcttggaccagacgtggaatttgttctgttggcaactgatggtctttgggactacataaaaagctctgaagctgtagcttttgtcagagatcaactccgtcagcatggtgatgtccagttggcctgcgaggcacttggtcagaaagctctggatcaacggtcccaagacaatattagcatagtcatagctgacttggggaggacaaactggaaggcgttgcccgatgaaaggccgaacttgttcttggaactaagtcaagcagtcgcgactgtaggggttgtctcaataggaatttgggtctcgtcgttccttgggttacagtag

SEQ ID NO: 26 - protein, 383 aa, Zea mays
  ref <308>: DATABASE ACCESSION NUMBER: GRMZM2G372297
MALLSPRVPRLPPSTFTSAAGARCFGPAARCQATAAGGVAAAGPPSSELEAIRWGSAKLQGARDEMEDEVLLRPGSLLDGFSFAAVLDGHAGFSAVQFLRDELYKECAAALDGGAVLSTKNLDAITASIQRAFAAVDAKLSTWLEQTDKDDSGATATVMFLRSDVLVVSHIGDSCLVISRGGRSEALTGSHRPYGNNKTSLEEVKRIRAAGGWIVDGRICGDISVSRAFGDIRFKTQKNEMLVKGVKQGRWTDKFISRIQFKDDIVISSPDVSLVELGPDVEFVLLATDGLWDYIKSSEAVAFVRDQLRQHGDVQLACEALGQKALDQRSQDNISIVIADLGRTNWKALPDERPNLFLELSQAVATVGVVSIGIWVSSFLGLQ

SEQ ID NO: 27 - DNA, 729 bp, Zea mays
  ref <308>: DATABASE ACCESSION NUMBER: GRMZM2G130149
atggtgacagtgagagaggagactcgcaaggggccatggacagagcaggaggacctgcaactggtatgcactgtccgtctgttcggtgaacgtcgttgggatttcattgccaaagtatcagggctcaaccggacaggcaagagctgccggctgcgctgggtcaactacctccaccctggcctcaagcgtgggcgcatgtctccccatgaagagcgactcatcctagagctgcacgctcggtggggaaacaggtggtccaggatagcacgccgcttgccagggcgcactgacaatgagatcaagaactactggaggacacacatgagaaagaaggcacaggagaggaagaggaacatgtctccatcgtcgtcctcgtcttcgctgacttaccagtcaggctacccagatactccatcaaccattggagttgagggacaggagcttcatggtggcagtggctgcatcacaagcatcctgaagggcacccctccggacatggatggctatcccatggaccagatatggatggaaattgaggcgccacagatgccctcggaggagagctttgttggggggaaccataatgtgtgcagcagccttgccaccccgctgccaccaccaactgtctgggaatactacccagatgcctgctggaaggttgacgatgagatcaagatggcaacacaatttcaatttggttatagtgaaggagttgggccctgcttctga

SEQ ID NO: 28 - protein, 242 aa, Zea mays
  ref <308>: DATABASE ACCESSION NUMBER: GRMZM2G130149
MVTVREETRKGPWTEQEDLQLVCTVRLFGERRWDFIAKVSGLNRTGKSCRLRWVNYLHPGLKRGRMSPHEERLILELHARWGNRWSRIARRLPGRTDNEIKNYWRTHMRKKAQERKRNMSPSSSSSSLTYQSGYPDTPSTIGVEGQELHGGSGCITSILKGTPPDMDGYPMDQIWMEIEAPQMPSEESFVGGNHNVCSSLATPLPPPTVWEYYPDACWKVDDEIKMATQFQFGYSEGVGPCF

SEQ ID NO: 29 - DNA, 690 bp, Zea mays
  ref <308>: DATABASE ACCESSION NUMBER: GRMZM2G474326
atgagcacgtacatatctctctccttagagcgcagcagcagcgtggtccgcgacgccgccaagtccgcgcctccgggcagtggtgtcagtgccccgtatccacgcgcgggcgcgggcgcgggcacgtcgctttccctgtccggcgcagcggcggcgcacgggcacggccagtacctccccctcaacgaggacgactccctggacatggtcctcttcgacgtgctccgcgaggcatccggctccgcacccggcgccacctaccagccgccctcgtcgtcgttgcctacgctgaaggcgctcgcttccggcgcctcgcgcaagggcggtggcaacaacggcaacggcagtagggccgcgcacgcacccaaggcggccacggggcggcactaccgcggggtgaggcggcggccgtggggcaagtacgccgcagagatccgtgacccggcgcggcacggggcgcggctctggctcggcaccttcgccacggccgaggaggccgccgcggcgtacgaccgcgccgcgttcggcatgcggggcgccaaggcgctgctcaacttcccgccgccggccgcgggctgcgggaacgccgcaaccgccacggcgaagcaggctgctggaagccaagtgaacaacggcgaatgcgatctcctcgaagaaaatgggtcatcgcatgatagtgaatgtttctaa

SEQ ID NO: 30 - protein, 229 aa, Zea mays
  ref <308>: DATABASE ACCESSION NUMBER: GRMZM2G474326
MSTYISLSLERSSSVVRDAAKSAPPGSGVSAPYPRAGAGAGTSLSLSGAAAAHGHGQYLPLNEDDSLDMVLFDVLREASGSAPGATYQPPSSSLPTLKALASGASRKGGGNNGNGSRAAHAPKAATGRHYRGVRRRPWGKYAAEIRDPARHGARLWLGTFATAEEAAAAYDRAAFGMRGAKALLNFPPPAAGCGNAATATAKQAAGSQVNNGECDLLEENGSSHDSECF

SEQ ID NO: 31 - DNA, 780 bp, Zea mays
  ref <308>: DATABASE ACCESSION NUMBER: GRMZM2G083347
atggaggtgaagaaggagggcgcgaaggcgacgctgccgccggggttcaggttccggccgacggacgaggagctgatcgtgcactacctgcggcggcgcgcgctggcctcgccgctgccggccgccgtcgacatcccggacgtccgcatcctggcgcacgacccgtccgacctgctgcccccagggttcggcgagcaggagcgctacttcttcacgtgcaaggaggccaagtacgtgaagggccggcgcgcgaaccgcgccacgggggccgggtactggaaggcgacgggcaaggagaagccggtggccgtggcggtccggggcgtgcaggggcagggccagggccagggcgtgctggtgggcatgaagcgctcgctggtgttctaccgcgggaagccgccgacggggagcaagacggagtgggtgatgcacgagtaccggctggcgggcgccgggctcgcgccgtgccgccgccgccacgccgacgccgacggagacggcgtggcgcgggcgccggccgagggctgggtgctgtgccgcgtgttccggaagaagggctccgccgccgtcgcgaggcggcccggcgaccgcagcgacggcgagggcgacgagagcgcgggcggcggtggaggatgcggcgggcgcgggttcatcgacttcttcgcgcgcgcggacgccgccgggcgaaggcgccgcgctccgtcgcccgccgtgtcgagccggtggcttgcggacgcgtcgccccagccggagcaggaggccaccagcagaggcccgtga

SEQ ID NO: 32 - protein, 259 aa, Zea mays
  ref <308>: DATABASE ACCESSION NUMBER: GRMZM2G083347
MEVKKEGAKATLPPGFRFRPTDEELIVHYLRRRALASPLPAAVDIPDVRILAHDPSDLLPPGFGEQERYFFTCKEAKYVKGRRANRATGAGYWKATGKEKPVAVAVRGVQGQGQGQGVLVGMKRSLVFYRGKPPTGSKTEWVMHEYRLAGAGLAPCRRRHADADGDGVARAPAEGWVLCRVFRKKGSAAVARRPGDRSDGEGDESAGGGGGCGGRGFIDFFARADAAGRRRRAPSPAVSSRWLADASPQPEQEATSRGP

SEQ ID NO: 33 - DNA, 699 bp, Zea mays
  ref <308>: DATABASE ACCESSION NUMBER: GRMZM2G380377
atggagtacgccgccgtcggctacggctacgggtacgggtacgacgagcgccaggagccggcggagtccgcggacggcggcggcggcggcgacgacgagtacgcgacggtgctgtcggcgccacccaagcggccggcggggcggaccaagttccgggagacgcggcaccccgtgtaccgcggcgtgcggcggcgcgggcccgcggggcgctgggtgtgcgaggtccgcgagcccaacaagaagtcgcgcatctggctcggcaccttcgccacccccgaggccgccgcgcgcgcgcacgacgtggccgcgctggccctgcggggccgcgccgcgtgcctcaacttcgccgactcggcgcgcctgctccaggtcgaccccgccacgctcgccacccccgacgacatccgccgcgccgccatccagctcgccgacgccgcctcgcagcaggatgagactgccgccgttgccgctgacgtggtcgcgccctcgcaggcggacgacgtcgccgccgccgccgccgccgcggcggcgatgtacggcggcggcatggagttcgaccactcgtattgctacgacgacgggatggtgagcgggagcagcgactgctggcaaagcggcgccggcgccggcggatggcatagcatcgtggacggcgacgacgacgacggcgccagcgacatgacgctctggagctactga

SEQ ID NO: 34 - protein, 232 aa, Zea mays
  ref <308>: DATABASE ACCESSION NUMBER: GRMZM2G380377
MEYAAVGYGYGYGYDERQEPAESADGGGGGDDEYATVLSAPPKRPAGRTKFRETRHPVYRGVRRRGPAGRWVCEVREPNKKSRIWLGTFATPEAAARAHDVAALALRGRAACLNFADSARLLQVDPATLATPDDIRRAAIQLADAASQQDETAAVAADVVAPSQADDVAAAAAAAAAMYGGGMEFDHSYCYDDGMVSGSSDCWQSGAGAGGWHSIVDGDDDDGASDMTLWSY

SEQ ID NO: 35 - DNA, 831 bp, Zea mays
  ref <308>: DATABASE ACCESSION NUMBER: GRMZM2G061487
atggccgctgctataaatctccccgggcccagcgaggatctgatgcgagcgatggagtccttcatgcaagacgacgccccatcccctctggccatgccgccggcgccgtctttcccagcggccgcagcccagtacccggcgacccacctgagcccggcgcagatgcagttcatccaggcccagctccacttgcagcggaacccggggctgggcccgcgggcgcagcccatgaagcccgccgtcccagtgccgccggcgccggcgccgcagcggcctgtgaagctgtaccgcggcgtgcggcagcgtcactggggcaagtgggtggccgagatccggctcccccggaaccgcacccgcctgtggctcgggaccttcgacaccgccgagcaggcggcgctggcctacgaccaggcggcgtaccgcctccgcggggacgcggcgcggctcaacttccccgacaacgcggagtccagggcgccgctcgaccccgccgtggacgccaagctgcaggccatctgcgccaccatcgccgccgcgtcgtcgtcatccaagaattccaaggccaagagcaaggcgacgccaatcaacgcgtccgttctggaagcggcagcggcgtctccgagcaacagctcctccgacgaaggttccggctccgggttcgggtcggacgacgagatgtcctcgtcctccccgacgccggtggtggcgccgccggtggcggacatgggacagctggatttcagcgaggttccgtgggacgaggacgagagcttcgtgctccgcaagtacccgtcctacgagatcgactgggacgcgctgctctccaactag

SEQ ID NO: 36 - protein, 276 aa, Zea mays
  ref <308>: DATABASE ACCESSION NUMBER: GRMZM2G061487
MAAAINLPGPSEDLMRAMESFMQDDAPSPLAMPPAPSFPAAAAQYPATHLSPAQMQFIQAQLHLQRNPGLGPRAQPMKPAVPVPPAPAPQRPVKLYRGVRQRHWGKWVAEIRLPRNRTRLWLGTFDTAEQAALAYDQAAYRLRGDAARLNFPDNAESRAPLDPAVDAKLQAICATIAAASSSSKNSKAKSKATPINASVLEAAAASPSNSSSDEGSGSGFGSDDEMSSSSPTPVVAPPVADMGQLDFSEVPWDEDESFVLRKYPSYEIDWDALLSN

SEQ ID NO: 37 - DNA, 900 bp, Zea mays
  ref <308>: DATABASE ACCESSION NUMBER: GRMZM2G301089
atgcagatggactcctacaactacaactacgccagtttcttccacgacgaggctccgtccttctacccgcacgttgcggtgccgccctccccggagctgcccatcggcctcattgcctcgccaggggagccggagccgcccttcgcgccgccgatgccggcctcgttccaggactacacgggcgccgtgggcgtgggcgtaggggtgagagcgccgttcgggggtgccagcgtgcacgggcaggcgatcgacgcgctgggcgggggcgacgggcagcgcgagcagagcatggcaatggcggaggacggggaagagccggcgccccggcggcggcagccggcgggaggccccgccgccgccgccgtcgagagcagccgcgggttccggcacatgatgcgggagcggcagcggcgcgagaagctgagccagagctacgccgacctgcacgcgctggtggcggcccggtccaggggcgacaagaactccatcgtgcaggccgccgccgtgtacatccacgagctcaggggcgcgcgggaccagctgcagcgccggaacgaggagctcaaggcccgcatcctgggccacgacgccgggcagcagtgcgtcaaggtgcagttcgaggtggacgagccggcgtccgccatcgactccatgatcggggcgctcaggcgcctcaagggcatggacgtcagggccaggggcatccgctccagcctgtccgggcgcaggctgtggacggagatgaatgtggagaccacgatggcggccgacgaggtggaaaggggcgtggaggaggctctgctgcaggaagtggagaggaagcagcagcagcagcttggagctgggagcgccgcccctggttttccaggcccgtcatcgcacgtgcaaaacgtgttttga

SEQ ID NO: 38 - protein, 299 aa, Zea mays
  ref <308>: DATABASE ACCESSION NUMBER: GRMZM2G301089
MQMDSYNYNYASFFHDEAPSFYPHVAVPPSPELPIGLIASPGEPEPPFAPPMPASFQDYTGAVGVGVGVRAPFGGASVHGQAIDALGGGDGQREQSMAMAEDGEEPAPRRRQPAGGPAAAAVESSRGFRHMMRERQRREKLSQSYADLHALVAARSRGDKNSIVQAAAVYIHELRGARDQLQRRNEELKARILGHDAGQQCVKVQFEVDEPASAIDSMIGALRRLKGMDVRARGIRSSLSGRRLWTEMNVETTMAADEVERGVEEALLQEVERKQQQQLGAGSAAPGFPGPSSHVQNVF

SEQ ID NO: 39 - DNA, 837 bp, Zea mays
  ref <308>: DATABASE ACCESSION NUMBER: GRMZM2G055158
atgggcaggcagccgtgctgcgagaagatcggtatcaagaaggggccgtggaccgcggaggaggaccagaagctggtcaccttcctcctgtctcacggccattgctgctggcggctcgtccccaagctcgcggggctgctgaggtgcgggaagagctgccggctgcggtggaccaactacctgaggccggacctcaagcgcggcctcctctcggaggaggaagaggcgctggtcatcgacctccacgcgcagctcggcaaccggtggtccaagatcgcggcgcggctgccggggaggacggacaacgagatcaagaaccactggaacacccacatcaagaagaagctcaagaagatgggcatcgaccccgtcacccacgggccgctcgctccggccactcaacctctggcgctggcgctggcgcagcagcgcgatcctccgcaggtggtgcgagaagaggaacgttgcgacgacgaccccagcaagcaggcatcgtcgcaagggctggcggcggtcgccgacgaggacgacgacgtggaggagacgccggcgagcgccgcccagccgcacggcgcgacgaccacctcccctgcttccgcagcggctggatccgtctcgccgtcctgctcctcctcggcctccggcgcggacgcggacgcggacgcggccgcctggcccggccccatcgacctcttcctcgaagtggacggcatcatggacatggactgggcgggcatcctttcgggctgcggcgatgacgacgccgccgacataagcggcgtcgatcttttcgaccattacgcaggcgatggctttgatgaacaagtctggatgtga

SEQ ID NO: 40 - protein, 278 aa, Zea mays
  ref <308>: DATABASE ACCESSION NUMBER: GRMZM2G055158
MGRQPCCEKIGIKKGPWTAEEDQKLVTFLLSHGHCCWRLVPKLAGLLRCGKSCRLRWTNYLRPDLKRGLLSEEEEALVIDLHAQLGNRWSKIAARLPGRTDNEIKNHWNTHIKKKLKKMGIDPVTHGPLAPATQPLALALAQQRDPPQVVREEERCDDDPSKQASSQGLAAVADEDDDVEETPASAAQPHGATTTSPASAAAGSVSPSCSSSASGADADADAAAWPGPIDLFLEVDGIMDMDWAGILSGCGDDDAADISGVDLFDHYAGDGFDEQVWM

SEQ ID NO: 41 - DNA, 2067 bp, Zea mays
  ref <308>: DATABASE ACCESSION NUMBER: GRMZM2G056120
atgggcatcgacctcaacatggcggacggcgagagccaggagcgccgcccgccgccggcggtgtgccgggagctgtggcacgcgtgcgcggggcccgtggttgcgctaccgcggcggggcagcctggtcgtgtacctgccgcaaggccacctagccgcggccggcggcggcaacgtcgctgtggacctgccgccgcacgtggcgtgccgcgtcgcggatgtcgagttatgcgcggatgcggcgacggacgaggtgtacgcgcggctggcgctggtcgcggagggcgaggcatttgggagaaatctgcgtggtggtggagtcgatggggacgatgacatggaggattttgatgttgaaaggaagtcccggatgttgcacatgttctgcaaaacgcttacagcctctgacacaagcacacatggagggttctctgttcctcgtcgtgctgctgaggactgtttcccgcctctggattataatcagctcaggccttctcaagagctggttgccaaggatttgcatggagccaagtggaaatttcgtcatatatataggggtcagcctcgtaggcatctcttgactactggatggagttcatttgtcaataaaaagaaactggtttctggggatgcggtcttatttctccgaggtgatgatggtgaactaaggctgggcgtacggagggccattcagcttaaaaatgaggccctttttgacgatttcagttgcgacagtacaaaacggcatacattgttggctgtagctgattccttgaagcacaaaagtgtttttcacatttcttacaatccaagagctactgcttcagaatatattataccacaccataagttcctgaagagcctaaatcttccattctgtattggagcaaggatcaacttacagtgccataatgaagatgttagtgaaaggcgatctggaatggttgttcatgtcagtgaaatagatcccatgaaatggccaggctcgaagtggagaagcctgctggtaagatgggaggatggtgttgaatgtaacggccaagatagagtatctccatgggagattgagatagctggtggctctgtctctgttgctcattctgtgtccgcatctagctctaaaagaaccaagttgtgtcctcagggaaatttggacgttccaacaatgtatgttacagggaatgggaatggttgtactgactccgtggaaactggaaagtttcccagggtcttgcaaggtcaagatttgatgagttttaggactcgtcatgttccgtctgctcctcaaactgttgaggctgcaaaacttcaatcttctggtgctagtaggttcctcagtaatgcacgtggctgcgcattgggtggtccaacaagcagactcgcagtgcataactctgattttacctaccaatctgtaggcttcaatgaatctattggattctcagaggtcttgcaaggtcaagaaatttctcgggcagttcctatgttccaaggaatgatgtctgaggcttgttcactaaaaggaggatatgggctgcatagttatatgcgtaccccagttgctgttactggattgtcagccacaactcaagagtgttctctcacactatctactccgccaggagcacaagttccttctgtctaccctgataatatttttaaccgaactgtggttcgacagcttggactggcaagcaagtttgatggtggagctacaaatgcccagcagtctgtcccatttgataggccgagggaaatttggagcaagccacagcatgaaatatctgatcaaacgaaaatggatcactttgagactagaagagcttcagcacctggagatgatgctgctaagcatgggtctggtggagaggtggttcgcaaaactagctgcagactttttggtttctcgttgactgagaagatcttgccagcagatgatgatggcatcaaggaagtgacctatgagcctgagtgccagaatccacggatgctggacctgttcgggtacaactgctcagccccaagtgctgctcttccagctctgtgtgctgccccctttggaatgtga

SEQ ID NO: 42 - protein, 688 aa, Zea mays
  ref <308>: DATABASE ACCESSION NUMBER: GRMZM2G056120
MGIDLNMADGESQERRPPPAVCRELWHACAGPVVALPRRGSLVVYLPQGHLAAAGGGNVAVDLPPHVACRVADVELCADAATDEVYARLALVAEGEAFGRNLRGGGVDGDDDMEDFDVERKSRMLHMFCKTLTASDTSTHGGFSVPRRAAEDCFPPLDYNQLRPSQELVAKDLHGAKWKFRHIYRGQPRRHLLTTGWSSFVNKKKLVSGDAVLFLRGDDGELRLGVRRAIQLKNEALFDDFSCDSTKRHTLLAVADSLKHKSVFHISYNPRATASEYIIPHHKFLKSLNLPFCIGARINLQCHNEDVSERRSGMVVHVSEIDPMKWPGSKWRSLLVRWEDGVECNGQDRVSPWEIEIAGGSVSVAHSVSASSSKRTKLCPQGNLDVPTMYVTGNGNGCTDSVETGKFPRVLQGQDLMSFRTRHVPSAPQTVEAAKLQSSGASRFLSNARGCALGGPTSRLAVHNSDFTYQSVGFNESIGFSEVLQGQEISRAVPMFQGMMSEACSLKGGYGLHSYMRTPVAVTGLSATTQECSLTLSTPPGAQVPSVYPDNIFNRTVVRQLGLASKFDGGATNAQQSVPFDRPREIWSKPQHEISDQTKMDHFETRRASAPGDDAAKHGSGGEVVRKTSCRLFGFSLTEKILPADDDGIKEVTYEPECQNPRMLDLFGYNCSAPSAALPALCAAPFGM

SEQ ID NO: 43 - DNA, 1755 bp, Zea mays
  ref <308>: DATABASE ACCESSION NUMBER: GRMZM2G177220
atggccctgaccgacgccaccgcgttcccctacggcctgcgggtcctcgtcgtcgacgacgaccccacctggctcaagatcctcgagaagatgctccgcaagtgttcatacgaagtcaccacatgcggtttagccagtgttgctatccaaattctccgggagaggagaaacaagtttgacattgtaatcagtgatgtcaacatgcctgacatggatggtttcaagcttctcgaactcattgggcttgagatggatctacctgttataatgatgtccatagacggagagacaagtagggtgatgaaaggtgtccagcatggtgcatgtgactacctcctcaagcctgttcggatgaaggaactccgaaacatttggcaacatgtgtataggaaaaaaatgcatgaggtgaaagagattgaaggtaatgacagctatgatgatctccaaatgtttagaaatggtgtagagggattcgacgagagggacctatttatgagagctgactctgatactatgaggaagagaaaagacgtgaataaggaccatgcagatcaggactcaagtgatggagctactgttaagaaggctagagttgtctggtctgttgaccttcaccagaaatttgtaaatgctgtcaaccaaattggatttgacaaagtcgggccgaagaaaatactggatcttatgaatgttcctggcctgacaagagagaatgtggccagtcatcttcagaaataccgcctctacttgagtaggttgcaaaagcagaacgaggaaaggataatgggtgctgctaggcaagatttcaatcaaaagggaccatcggatcatcttaacctccgaagttccttccaagagcaaccaggcaacctttccaatggatgtcagcatagttctcagaaggtcgaagctcagaccaacattctcgatcctcatctggacgacacgaagacttcaatgcccttgaaggtgccagataaaaatggaatttcagcaagtgatgctgttgaccctcacaatatcaccactgcttcacctttaagtggggtgttctcttttgaaagaatgccagtgaatcaggacaggaagctatcagaaaccatgatcttggaatgtgagtcctggagtggaagtgtgccaccaaagcagttcatgcagtatccaaagcataaccatgagcgctgcgaccttctaggagactattcttgcttgcctaaaccggacttggagcacccaattgcccctggtcatctgtatgccccaccgccagtaatttcgatgagttacaatgtggagaaagatgtcagagacttctcagatgtaaaaccagatcttcttggctgtatgaagtccttatcaccagcactgacatgtacagttgagtcggtttctgctcaacttagtgacagtgttgtgacctcaactaacagtgaccggaagttttccagcgtggaggggttgtccagcattaaagattgtgactttgatcaggaaaggaacggagctattttgtttacttcagaagaggcaagtatattatgcggcactgattttacttgtctacctgaagacctgtccggctatcaacttcaaggtgtctccttcgggaataaaggattgaacagcatcgatttatatcagtgcaatgatacaatgttaatacctggactgcagaataattggtatgatgatgatgtagagtttagcagtgaaaccgtggagttcccattgctagacggaggcctgtttgcataa

SEQ ID NO: 44 - protein, 584 aa, Zea mays
  ref <308>: DATABASE ACCESSION NUMBER: GRMZM2G177220
MALTDATAFPYGLRVLVVDDDPTWLKILEKMLRKCSYEVTTCGLASVAIQILRERRNKFDIVISDVNMPDMDGFKLLELIGLEMDLPVIMMSIDGETSRVMKGVQHGACDYLLKPVRMKELRNIWQHVYRKKMHEVKEIEGNDSYDDLQMFRNGVEGFDERDLFMRADSDTMRKRKDVNKDHADQDSSDGATVKKARVVWSVDLHQKFVNAVNQIGFDKVGPKKILDLMNVPGLTRENVASHLQKYRLYLSRLQKQNEERIMGAARQDFNQKGPSDHLNLRSSFQEQPGNLSNGCQHSSQKVEAQTNILDPHLDDTKTSMPLKVPDKNGISASDAVDPHNITTASPLSGVFSFERMPVNQDRKLSETMILECESWSGSVPPKQFMQYPKHNHERCDLLGDYSCLPKPDLEHPIAPGHLYAPPPVISMSYNVEKDVRDFSDVKPDLLGCMKSLSPALTCTVESVSAQLSDSVVTSTNSDRKFSSVEGLSSIKDCDFDQERNGAILFTSEEASILCGTDFTCLPEDLSGYQLQGVSFGNKGLNSIDLYQCNDTMLIPGLQNNWYDDDVEFSSETVEFPLLDGGLFA

SEQ ID NO: 45 - DNA, 777 bp, Zea mays
  ref <308>: DATABASE ACCESSION NUMBER: GRMZM2G042895
atggaaatgggcgacagcttcgagtactactgggagatgcagcagtacctggagtcagaggagctcagcctctacatgggcacccaggacgatgccctgtcctgctacgactccagctcgccggatggctccatctccaactcgtcctgggcgccggcgggcgtggcggccacggcgtccgagaagcgggagggccccggcggcgcggcggccgcgaacaagaacatcctcatggagcgcgaccgccggcgcaagctcaacgagaagctctacgcgctgcgcagcgtcgtgcccaacatcacaaagatggacaaggcgtcgatcatcaaggacgcgatcgagtacatcgagcagctacaggcggaggagcggcgggcgctgcaggcgctcgaggccggcgagggggcgcgctgcggcggccacgggcacggcgaggaggcgcgcgtggtcctgcagcagcccgccgccgccccggcgcccgtggaggtcctggagctgcgcgtgtcggaggtgggcgaccgcgtgctggtggtgaacgtgacgtgcagcaagggccgcgacgccatggcccgcgtgtgccgcgccgtcgaggagctccggctccgcgtcatcaccgccagcgtcacctccgtcgccggctgcctcatgcacaccatcttcgtcgaggtggattcggaccagacgaatcgtatccagatcaagcacatgatcgaggccgctctcgcccagctagatgatgcctccgcgagcccgccgagcgtgatgagctactattag

SEQ ID NO: 46 - protein, 258 aa, Zea mays
  ref <308>: DATABASE ACCESSION NUMBER: GRMZM2G042895
MEMGDSFEYYWEMQQYLESEELSLYMGTQDDALSCYDSSSPDGSISNSSWAPAGVAATASEKREGPGGAAAANKNILMERDRRRKLNEKLYALRSVVPNITKMDKASIIKDAIEYIEQLQAEERRALQALEAGEGARCGGHGHGEEARVVLQQPAAAPAPVEVLELRVSEVGDRVLVVNVTCSKGRDAMARVCRAVEELRLRVITASVTSVAGCLMHTIFVEVDSDQTNRIQIKHMIEAALAQLDDASASPPSVMSYY

SEQ ID NO: 47 - DNA, 2892 bp, Zea mays
  ref <308>: DATABASE ACCESSION NUMBER: GRMZM2G158162
atggctatggcgggcgccggcgcggcggcggcggcggccaagaggtgcatgaacccggcctgcggcgcgctgccggcgtcatctgtggtggtcggggcgggaggggactggaggaagggctggccgctgcgatccggaggcttcgccctgctctgcgacaagtgtgggttggcatatgaacagttcgtgttttgtgatatatttcaccaaaaggaatcaggatggagagactgctcattttgtggcaagcgcctccattgtggatgtgttgcttcaaagaactcttatgatctacttgacagtggaggaattcaatgtgtcacttgcatgaaaaattcagcagctcagtctgcttctggacaagtggttccaaagctctttccatgtccaaacaatctgctgttttttggtaaaagcgacgagttattgtcaagcagaaaatttgaacaaccaccctctcttatgttggattccagaaatgatgatattgctattgtaaataagagtagtcacctgttcatggtaagcggcatagaggctggacagagcagtaacatcttgagacaaaaagagatagagaatggtccaaggcagattaaatgggaacaaccaacccttaatattggggacatgggaagacctttactaactaggtctcaaagtgcattagagtcacctcagtgtactcgaagagatgacaataaggatccaactacagatagcacaacaagtgaatcgtttccagaggcatgtctgagcatgaacctaggtattgcaaacaatggaaacaggatggaggctacttcaacagcggaaagacctatgctatcgccaacgacagccattgctgaaggaagagaacttaccactgcactgtccccctttcagcacgcacaaagggctcggcatttcctgaccagaccaccaagggttggtgagggtgcagcttttgatccaactagagacatgtttccgcatcttcgtgttgctaggccacctgctgaaggaaggggccgcaatcaattacttcctcggtattggccaagaataacagaccaagagctgcaacaaatatctggagattcaaattccacaatcgttccattgttcgagaaggtcctgagtgcgagtgatgcaggccgcatagggcgccttgttcttccaaaagcttgtgccgaggcatattttcccccaatttctcaaccagaaggacgccccttgacaattcaagatgcaagaggaaaagaatggcattttcagtttaggttttggccaaataataacagcagaatgtatgtcttggagggtgttacaccatgcatacaatcattgcaattacaagctggcgatacagtgacctttagtcgtatagatcctggagggaaacttgttatgggctttcggaaggccacaaatactgtcagtctgccagactcacagatttcagctattgcgaatggttcccttctcagtgagacactcttttctactgcaaatgaaagcataggagtagtaagtggttatcctggatttcttcactcaataaagggagctgcagatttccatccaagctctctatatgatcatcatattaactcagctgacggggatgtcagttggaataaggcagataaatttggcagcaggccagatgaggggtctttgcaatttctacaaaaacgaagtcgcaatattggttccaaaagcaggaggttcttaatcgacgctgaagatgccatggaactaaagcttacctgggaagaagctcaagagttgttgcgccctgctcccactgcaaaaccaactgttgtgatgattgaggactatgaatttgaagaatatgatgaaccccctgtctttgcaaagagatcaatttttaccatccgtgcaacaggggaacaagaccagtggattcaatgtgacgagtgctcaaaatggcgccggttgcctcttaatgttattgttgcatccaaatggacatgcaccgacaactcatgggacccaaaatgctgctcctgctctgcgcctgaagagttgaccccaaaagagttgcaaagtgttatgcagcagtatgaagaaatgaggaggcgaaagggcagctatggtctgaagctgaatgtcgctgaaatggatgcatccagctttgacgccttggccacgggtgcagtattcggtgaagtcgggaaccaaggtacggcttcagtcgcgacgaccacaaggcaccccaggcatcgccccggctgcacatgcatcgtgtgcatccagccacccagtggcaagggcccgaagcacaaccctgcgtgcacctgcaacgtgtgcatgacggtgaggcgccggttcaagacactgatgatgaggaagaagcagcggcagtcggagcgagaggaggcggaggcaagcaagaagatcgcgtgggtgaacagagacgagcccgaggggagcagcctgtcgagatccccgcagacgctggacacgacccgagacagcagcgatgtcaccatgttcgacaaggtggccgccgacgtgaacaaggggcacatcgacctcaacttccaccctgcagcccctgccgtccgtggcgctggcgaccagggacagaatggcgcgcagcagccccgggcggtgagcatgatgggcctcctggaagtggcgagccggccccttgataactacatgaagcagaacggcctgacgagcctggcgggggagcaaggaggtggcagctccagcacggccacggtcccgccggctccagtggagagtgaggaccggacgtccgatgagggccgtgtcgcgtcagcagagcgggaagcagacgccatggccatcgacgaggccggcgagaaccagcaggacaagcctgccgactctgccgctgccgctgctacttga

SEQ ID NO: 48 - protein, 963 aa, Zea mays
  ref <308>: DATABASE ACCESSION NUMBER: GRMZM2G158162
MAMAGAGAAAAAAKRCMNPACGALPASSVVVGAGGDWRKGWPLRSGGFALLCDKCGLAYEQFVFCDIFHQKESGWRDCSFCGKRLHCGCVASKNSYDLLDSGGIQCVTCMKNSAAQSASGQVVPKLFPCPNNLLFFGKSDELLSSRKFEQPPSLMLDSRNDDIAIVNKSSHLFMVSGIEAGQSSNILRQKEIENGPRQIKWEQPTLNIGDMGRPLLTRSQSALESPQCTRRDDNKDPTTDSTTSESFPEACLSMNLGIANNGNRMEATSTAERPMLSPTTAIAEGRELTTALSPFQHAQRARHFLTRPPRVGEGAAFDPTRDMFPHLRVARPPAEGRGRNQLLPRYWPRITDQELQQISGDSNSTIVPLFEKVLSASDAGRIGRLVLPKACAEAYFPPISQPEGRPLTIQDARGKEWHFQFRFWPNNNSRMYVLEGVTPCIQSLQLQAGDTVTFSRIDPGGKLVMGFRKATNTVSLPDSQISAIANGSLLSETLFSTANESIGVVSGYPGFLHSIKGAADFHPSSLYDHHINSADGDVSWNKADKFGSRPDEGSLQFLQKRSRNIGSKSRRFLIDAEDAMELKLTWEEAQELLRPAPTAKPTVVMIEDYEFEEYDEPPVFAKRSIFTIRATGEQDQWIQCDECSKWRRLPLNVIVASKWTCTDNSWDPKCCSCSAPEELTPKELQSVMQQYEEMRRRKGSYGLKLNVAEMDASSFDALATGAVFGEVGNQGTASVATTTRHPRHRPGCTCIVCIQPPSGKGPKHNPACTCNVCMTVRRRFKTLMMRKKQRQSEREEAEASKKIAWVNRDEPEGSSLSRSPQTLDTTRDSSDVTMFDKVAADVNKGHIDLNFHPAAPAVRGAGDQGQNGAQQPRAVSMMGLLEVASRPLDNYMKQNGLTSLAGEQGGGSSSTATVPPAPVESEDRTSDEGRVASAEREADAMAIDEAGENQQDKPADSAAAAAT

SEQ ID NO: 49 - DNA, 636 bp, Zea mays
  ref <308>: DATABASE ACCESSION NUMBER: GRMZM2G142718
atggcgcctgcagcttcgatcctctcggtcaccgccgtcgccggttccaagcgtccggccgcttccgacgctgagctcccgctcctcgacctcgactcctcctcgctccaccagcagcagggtgacaaggctgggcgcaagggccaggaccaggaccaccaccagcagcagcagctggagtgcccgcgctgccgctccaccaacaccaagttctgctactacaacaactacagcacggcgcagccgcgccacttctgccgcgcgtgccgccgctactggacgcacggcggcacgctgcgcgacgtcccggttggcggggcctcgcgccgcgccggtgggggcggcaagcggcgcagggtctcctccgccgagacctcgtcgtcgtcgccgccggtgcctgcgtcgctcgcggacgcgtgcctgtccgacctcccgtccgtcttcccgttcctcagcgacggcagcttcttcccgcagctcgacctcggcgccgtcgtgcttgcaccgccggccttctcctcctcgtggcggtcggtggccccggacttctacgacgggctcgcgccgtggggcgacatcgccggcctcgacctcagctggacaccaccggggagcgccagccggtcgccgtcttga

SEQ ID NO: 50 - protein, 211 aa, Zea mays
  ref <308>: DATABASE ACCESSION NUMBER: GRMZM2G142718
MAPAASILSVTAVAGSKRPAASDAELPLLDLDSSSLHQQQGDKAGRKGQDQDHHQQQQLECPRCRSTNTKFCYYNNYSTAQPRHFCRACRRYWTHGGTLRDVPVGGASRRAGGGGKRRRVSSAETSSSSPPVPASLADACLSDLPSVFPFLSDGSFFPQLDLGAVVLAPPAFSSSWRSVAPDFYDGLAPWGDIAGLDLSWTPPGSASRSPS

SEQ ID NO: 51 - DNA, 1311 bp, Zea mays
  ref <308>: DATABASE ACCESSION NUMBER: GRMZM2G166721
atgaatagggcgcacagcagcagctccaagctcatcaacgagaagctcgtggaacaccggatctccactgcgaagcactgcccccactgcggcgagaaaatcgacagcaaaccggattgggtggggctgccggcaggcgtcaagttcgatccaactgaccaggagctgatcgagcacctcgaggcgaaagtgaaggatgaaggctcgagatctcaccctctcatcgacgagttcatacccacaatagatggggaggacggcatatgttacacccaccccgagaaacttccaggtgtgacgagggatggcctaagcaagcacttcttccaccggccgtccaaggcctacacgacgggcacgaggaagaggaggaagatacagacggagtgcgacgtccacaagggggagacgaggtggcacaagaccggcaagacgcggccggtgatggtgaacggccggcagaaggggtgcaagaagatattggtgctgtacaccaacttcggcaagcaccgcaagccggagaagacgaactgggtcatgcaccagtaccacctcggcgacctagaagaggagaaggagggggagctggtggtgtgcaagatcttctaccagacgcaacccaggcagtgcagctggtcctccgaccggggcgccgccgccactgccttggcagcaacggcggcagcggcggcggcgcaggagcagcataggagggatagtggcagtggcagctgctcgtctagggaccacgaggtgtcagccacatcgttcccagccggatacacagtcaccacggccgtcgagatgcagcagcatatgaagcagcctgcggaccatttcagcttcgcgcctttcaggaaaaccttcgaccaggaggttggtataggtggtgatcaggtgccatctaatcagcttggacgttcagagccgcatcatgccggcctggggcagcagccacacggcccggtgctcgcgacgaagacggctgtgcctgctacagctttcctgatcagtaggccatcgaaccctgtctcgactatagtgccacctgcaatgcagcacgcatcagttgttctcgatcatgatcagttccatgtgccagcaatccttctccatcaccatgacaaatttcagaacatgcaccaacagccacaacaaaagcttgaccgcagatctgccggcttggaagaactgataatgggctgcacgtcgtccacaagcacaaaaggagatgcttccattgctcacccccaagagacagaatggccttacacgtactggccacctgacaaccaagatcatcatgggtag

SEQ ID NO: 52 - protein, 436 aa, Zea mays
  ref <308>: DATABASE ACCESSION NUMBER: GRMZM2G166721
MNRAHSSSSKLINEKLVEHRISTAKHCPHCGEKIDSKPDWVGLPAGVKFDPTDQELIEHLEAKVKDEGSRSHPLIDEFIPTIDGEDGICYTHPEKLPGVTRDGLSKHFFHRPSKAYTTGTRKRRKIQTECDVHKGETRWHKTGKTRPVMVNGRQKGCKKILVLYTNFGKHRKPEKTNWVMHQYHLGDLEEEKEGELVVCKIFYQTQPRQCSWSSDRGAAATALAATAAAAAAQEQHRRDSGSGSCSSRDHEVSATSFPAGYTVTTAVEMQQHMKQPADHFSFAPFRKTFDQEVGIGGDQVPSNQLGRSEPHHAGLGQQPHGPVLATKTAVPATAFLISRPSNPVSTIVPPAMQHASVVLDHDQFHVPAILLHHHDKFQNMHQQPQQKLDRRSAGLEELIMGCTSSTSTKGDASIAHPQETEWPYTYWPPDNQDHHG

SEQ ID NO: 53 - DNA, 1302 bp, Zea mays
  ref <308>: DATABASE ACCESSION NUMBER: GRMZM2G118453
atggagggcgcgtcctcgctgccgcccttcctgagcaagacgtacgagatggtggacgacccggccacggacgccgtggtggcgtggacgccgctggggaccagcttcgtcgtcgccaaccaggccgagttctgcagggatctgctccccaagtacttcaagcacaacaacttctccagcttcgtgcggcaactgaacacctacggctttaagaaaattgatcctgaacaatgggagtttgcaaatgatgatttcattaggggacaacagcaccgactgaaaaatatacacaggcgtaagcctatattcagccattcatcgcatactcagggttctggaccattaccagataccgaaaggagggattatgaggaggaaatcgaaaggcttaagtgtgacaatgcagctctgacctcagagcttgaaaagaatgcacagaagaaacttgttacagagaaacgaatgcaggagctagaagataagttgatctttttggaggatcggcagaaaaatctgatggcgtatgtcagggatattgtacaggcaccaggatctttctctagctttgtgcagcaacctgatcatcacggaaagaaaaggagactaccagtacctatctctctctaccaagattctaatgctgaggggaaccaggttgtgcatgggggcttcatcaccaacccaccagcttgcagggaatcattcgacaagacggaatcttcgttgaactcattggagaatttccttcgggaagcgagtgaagcgttcaatatttcatatggtgatggcctccctggcccttcatctgctgtcgttatcacagagctccattcatccggagaaagtgatccccatgtgccatcacctgtctcaagaatgcatacatcttcggctggtgcgggagattcgctctcttcccgcgatttaacagagtcaactagctgcgctgagagccctcgcctcgctcagatccaaccctgtacagattcacggactaaggtgtctgagatcgatgtcaatcgggagcctgctgtcacagaaactggtccgacaagggaccaacctgccgaggagcctccccacgtagcagctggggtgaacgatggcttttggcagcagttcctcacagagcagcccggtcctgatgtacaccaggaggcccaatcagaaaggagagatggcgatgatgataagggcgatcagacgaggataggggaccgagaaaatttttggtgggggaagaagaatgttgagcagatgagagagaagctggggcgtctcacctcggtggagaaaacctga

SEQ ID NO: 54 - protein, 433 aa, Zea mays
  ref <308>: DATABASE ACCESSION NUMBER: GRMZM2G118453
MEGASSLPPFLSKTYEMVDDPATDAVVAWTPLGTSFVVANQAEFCRDLLPKYFKHNNFSSFVRQLNTYGFKKIDPEQWEFANDDFIRGQQHRLKNIHRRKPIFSHSSHTQGSGPLPDTERRDYEEEIERLKCDNAALTSELEKNAQKKLVTEKRMQELEDKLIFLEDRQKNLMAYVRDIVQAPGSFSSFVQQPDHHGKKRRLPVPISLYQDSNAEGNQVVHGGFITNPPACRESFDKTESSLNSLENFLREASEAFNISYGDGLPGPSSAVVITELHSSGESDPHVPSPVSRMHTSSAGAGDSLSSRDLTESTSCAESPRLAQIQPCTDSRTKVSEIDVNREPAVTETGPTRDQPAEEPPHVAAGVNDGFWQQFLTEQPGPDVHQEAQSERRDGDDDKGDQTRIGDRENFWWGKKNVEQMREKLGRLTSVEKT

SEQ ID NO: 55 - DNA, 1860 bp, Zea mays
  ref <308>: DATABASE ACCESSION NUMBER: GRMZM2G416184
atgaagttcatgaagctgggctccaagcccgacgccttccagtccgacggcgccgacgtccgatatgtggtctctgaccttgcaacagatgttgtggtgcatgttggtgaagtaaaattttacttgcacaagtttcccctcctttccaagagcggcaagcttcaaagattagttctgaaggccgctgaggacgagactgatgaggttcgcatagatgaccttcctgggggagcaaaatcattcgaaatatgtgccaagttctgctatggaatggtggtcaccctcagtccacacaacgttgtagctgcaagatgtgcgtcacagtatcttgaaatgaccgaagatatggaaaaggggaacttgatatttaaaatcgaggtcttcataaattctagcatacttcgtagctggaaggactctatcattgttctccagagcacaaaggctctatcaccatggtctgaagagctgaaggttgtgggtagatgtatcgatgccatcgcttcgaagacgtctgcggatcctgccaatgtaacctggtcatacagtcatagtagcaagaaaggaggagcttgtgctgaaatagtcgagccagcaggaaagccatcaatagctccaaaagattggtgggttgaggacttgtgtgaactggatgttgacctgtacaagagagtcatggttgctatcaaatccaaggggagaatgtcacctgaactgataggagaggcacttaaagcctatgcagttagatggctgccagactcctacgatgcattagttgccgaggattacatgaggaggaatcaatgtctggttgagacaataatatggttgctgccttctgacaagagctcgggatgttcttgcagatttctcctgaaactgttgaaagtggccatactagtcggaggcggggagcacgtgaaggaagagcttatcaggaggatcagcttccagttgcacaaagctactgttaaggatctcttattacctgccacttcgcctaatgatggtacctatgatgttcggctggtgcataatcttgtccagagatttgttgcaagaacagcgctgtctcataatggcggtttcattgagaagtccgacgaaaagatgattgagctcaacttcgagcaagaatccattttgtcggtaggagagcttgttgatggctacctgtctgaagtagcttcggatcaagacctttcgttgtctatgtttgttgaactggcgactgccgtgccagaggtggctaggcctgttcatgacaacctgtactatgcagtcgatgcatatctcaaggaacacccagacataaacaagtccgagaagaagaagatttgcagtctggtggatgtcaagaagctcagcgcagatgcatccgtgcacgccacacaaaacgaccgcctgcctctccggttggtggttcaggtcctcttcttccagcagctgagggccggcccaagcaaagaactcgccctgattgacaatggagaacacgcttgcacacggcctacgcaggatcaatgtgaccgtggtgaaaggcggataccgaagcatccaaactcactgaataagcaggtgacaagcctgagcgcgagagagagccagcagcaccggatcagcgagcacaggggcggcaggaacagctttaaagaccagcttgggggcctcctgctgcagtcgcgatccaggaggatctttgacaagctgtggagcagcaaagggcagggcgagcatggcgggaaaggctcggagacgtctggtagctcgcagagcccaccgttgtcagcaaagcctgcagaagtgaagccctcccctcttccccctcttaggggcaggaggtactctgtttcttag

SEQ ID NO: 56 - protein, 619 aa, Zea mays
  ref <308>: DATABASE ACCESSION NUMBER: GRMZM2G416184
MKFMKLGSKPDAFQSDGADVRYVVSDLATDVVVHVGEVKFYLHKFPLLSKSGKLQRLVLKAAEDETDEVRIDDLPGGAKSFEICAKFCYGMVVTLSPHNVVAARCASQYLEMTEDMEKGNLIFKIEVFINSSILRSWKDSIIVLQSTKALSPWSEELKVVGRCIDAIASKTSADPANVTWSYSHSSKKGGACAEIVEPAGKPSIAPKDWWVEDLCELDVDLYKRVMVAIKSKGRMSPELIGEALKAYAVRWLPDSYDALVAEDYMRRNQCLVETIIWLLPSDKSSGCSCRFLLKLLKVAILVGGGEHVKEELIRRISFQLHKATVKDLLLPATSPNDGTYDVRLVHNLVQRFVARTALSHNGGFIEKSDEKMIELNFEQESILSVGELVDGYLSEVASDQDLSLSMFVELATAVPEVARPVHDNLYYAVDAYLKEHPDINKSEKKKICSLVDVKKLSADASVHATQNDRLPLRLVVQVLFFQQLRAGPSKELALIDNGEHACTRPTQDQCDRGERRIPKHPNSLNKQVTSLSARESQQHRISEHRGGRNSFKDQLGGLLLQSRSRRIFDKLWSSKGQGEHGGKGSETSGSSQSPPLSAKPAEVKPSPLPPLRGRRYSVS

SEQ ID NO: 57 - DNA, 1074 bp, Zea mays
  ref <308>: DATABASE ACCESSION NUMBER: GRMZM2G149756
atgtgcttcgagctggcggaccagcgcggaccgcagggcggcggcggagcggggtggccggcgaagcggcgcgcgggaggcgtgcaggacgagggcgcggccgcggccgcggggatggcaatggcggccgccggccccggggaggtgatgtccgagtactaccaggcgcaggagctgtcgacgatggtgtcggcgctgacccacgtcgtggccggcgcgccgatggggagcgcccctgcgcagcggccaatgcacggcgcctccggctactacgcgcacgagatggggagctaccgcggcgcgccatcgccggagctcgcagggtcggagctgagttcggacacccagagcgcgggcgcggcggccatggaggagcaccagtcggcagctgcgctgtccagccaggagggtcccgagacgccgcggaggcgctaccgcggggtgcgccagcggccgtggggcaagtgggccgccgagatccgggacccgcacaaggcggcgcgcgtctggctcggcacgttcgagaccgccgaggccgcggcgcgcgcctacgacgaggccgcgctccgcttccgcggcagccgcgccaagctcaacttccccgaggacgcgcgcctctacccggcgtccacggcgggcgcggcggcgcctctcgccgcggcggcctcgacctccccacctgtctactccggtggcgtccagggctcgtcggactacctgaggtaccaccagatgcttctgcaagcgtccacgggcagccagggcaccctgctcccgttctatggcggcggcatgagcaatccctacggcggcggtgccgccatgaccggttcctacggtggagccggcggcggcaacacgagtggttccttgggctcctactactcgttcccggcctcctctgtttctgtcgccaccgtgccgtcctctacttcctctgcttcggggtactactactcgtcgccgcacgactcgcaacacagcgaggcgtccgcggcggcggactggaactgggagagcgcgctggcctggcccgactcgagccagtacccgccgccacctcacactcagtag

SEQ ID NO: 58 - protein, 357 aa, Zea mays
  ref <308>: DATABASE ACCESSION NUMBER: GRMZM2G149756
MCFELADQRGPQGGGGAGWPAKRRAGGVQDEGAAAAAGMAMAAAGPGEVMSEYYQAQELSTMVSALTHVVAGAPMGSAPAQRPMHGASGYYAHEMGSYRGAPSPELAGSELSSDTQSAGAAAMEEHQSAAALSSQEGPETPRRRYRGVRQRPWGKWAAEIRDPHKAARVWLGTFETAEAAARAYDEAALRFRGSRAKLNFPEDARLYPASTAGAAAPLAAAASTSPPVYSGGVQGSSDYLRYHQMLLQASTGSQGTLLPFYGGGMSNPYGGGAAMTGSYGGAGGGNTSGSLGSYYSFPASSVSVATVPSSTSSASGYYYSSPHDSQHSEASAAADWNWESALAWPDSSQYPPPPHTQ

SEQ ID NO: 59 - DNA, 2553 bp, Zea mays
  ref <308>: DATABASE ACCESSION NUMBER: GRMZM2G109354
atggacgcccccgattccggcggtggcggctcggcggatgccggcgagcctatctgggactggggcaatctcctcgacttcgtcgtccaggatgacgactccctcatcctcccctgggatgacgccgccggcatagcagcatccgaccccaccgaggccgccacggcactgctccccgcctcgcccccgcttccgcagtcggtggaggaggagccggagccggagccggaaccggggccagtgcttccgccgccccctcttcgggttcaggggatcgggcgccgcgtcaggaagcgggacccgcggctggtgtgcccgaactatctcgcggggatagtcccatgcgcgtgccccgaggtggacgagatggtcgccgctgccgaggtggaggacgtggcgacggagttccttgctggcgcgcggaagaagactaagactgctggtcgccgtggcaaagcggaagctgcaggtactgccggaggaactgtccgcgcggcggtggcggagatgaagtgccaagtgcctggctgtgaggcggacatacgggagctgaaagggtaccatcgccggcaccgtgtgtgtctgcgctgcgcgcacgctgctactgtcatgctcgatggtgtccagaagcgctactgccagcagtgcggcaagttccatgtattactagatttcgatgaagataaaaggagttgtagaagaaagttggagcgtcacaacaaaagaagacgaagaaaacctgattccaaaggaacattagataaagaaattgatgaaccattggatatgccagcagatgttagtggcagcgatgaacttagagaagagaacatggaaggcataaccagtgagattcttgagactgttcttagcaacaaggtgatggacagagaaacacctgtgggatctgaagatgtgcttagttcaccaacctgtacacaaccttgtttgcaaaatgaccaaagtaaaagtgtagttacctttgcagcttctgttgaagcctgcattggtgcaaagcaggaaagcataaaacttgccaattccccaatgcatgacaccaagagtgcatattcatcctcgtgtccaacagggcgcatctcattcaagttgtatgattggaatcctgcagaatttcctcgacgactacgacaccagatcttcgaatggttgggtagcatgcctgttgaattggagggctacattcgtccgggttgtattattttaactgtatttattgcaatgccacagcatatgtgggacaagttatcagatgatgcagcagatcttctcagaaacttggtaaattccccaaacagtcttttgttgggtaaaggggccttcttcattcatgtcaataacatgttatttcaagtactaaaagatgaaacaacattgatgagtaccagattagatatacaagctccaaggattgattatgttcatccaacatggtttgaagcagggaaacctgtcaatcttatcctttatggaagttctcttgaccaaccgaacttcaggtcacttctgtcttttggtggagactatttgaagcatgattgctaccgtttaccatctcatgatacctttgatggttttgagagtggtgattttattcctgattctcaacatgaaattttccgaattcacatcactcaatcaagaccagatatttatggacctgcatttgtggaagttgaaaacatgtttgggttatcaaattttgttcctatcctttttggaagcaaacagttgtgttctgaactagagaggatacatgatgctctttgtggttcttacagtgaaaataatgtacttggtgagttactcagtgcttcttctgatcctcatgagcaccggaaactttgtagttctgtgatgtctggattcctgatcgacattggatggcttatcagaaagcctactcctgacgaatttaaaagtgtgctgagttcaacaaatatacagagatggatatgcatgttgaagtttttgatacagaatgatttcatcaatgttctggagataatcgtgaagtcaatggacagcatcatgggttcagaggttctttcaaacttggaaagggggaggttggaagatcatgtaacagcatttcttggatatgtaagccatgctcggaatattgctgatcgtagagctaaccatgacgagaaaacacagattgaaacaagaggcattattgttacttctccaaatcagccaaacttaggcgcctcagtgccatttgctagtgaaaacactgactttggaggggataacaaattgaactcaactgatgaggaagaaattatgccacttgtgactagagatgtctcacaccggcactgctgccagcctgatacgactgttaggtggcttaagccctcactgattgttacttatcctggtggtgccacgagaatgcgacttgttacgactgtggcggttgcggctgttttgtgtttcacagcttgtcttgttcttttccatccgcatggggtaggggtgcttgcagctccagtgaagaggtacttgtcgagtgactccgcatcgtag

SEQ ID NO: 60 - protein, 850 aa, Zea mays
  ref <308>: DATABASE ACCESSION NUMBER: GRMZM2G109354
MDAPDSGGGGSADAGEPIWDWGNLLDFVVQDDDSLILPWDDAAGIAASDPTEAATALLPASPPLPQSVEEEPEPEPEPGPVLPPPPLRVQGIGRRVRKRDPRLVCPNYLAGIVPCACPEVDEMVAAAEVEDVATEFLAGARKKTKTAGRRGKAEAAGTAGGTVRAAVAEMKCQVPGCEADIRELKGYHRRHRVCLRCAHAATVMLDGVQKRYCQQCGKFHVLLDFDEDKRSCRRKLERHNKRRRRKPDSKGTLDKEIDEPLDMPADVSGSDELREENMEGITSEILETVLSNKVMDRETPVGSEDVLSSPTCTQPCLQNDQSKSVVTFAASVEACIGAKQESIKLANSPMHDTKSAYSSSCPTGRISFKLYDWNPAEFPRRLRHQIFEWLGSMPVELEGYIRPGCIILTVFIAMPQHMWDKLSDDAADLLRNLVNSPNSLLLGKGAFFIHVNNMLFQVLKDETTLMSTRLDIQAPRIDYVHPTWFEAGKPVNLILYGSSLDQPNFRSLLSFGGDYLKHDCYRLPSHDTFDGFESGDFIPDSQHEIFRIHITQSRPDIYGPAFVEVENMFGLSNFVPILFGSKQLCSELERIHDALCGSYSENNVLGELLSASSDPHEHRKLCSSVMSGFLIDIGWLIRKPTPDEFKSVLSSTNIQRWICMLKFLIQNDFINVLEIIVKSMDSIMGSEVLSNLERGRLEDHVTAFLGYVSHARNIADRRANHDEKTQIETRGIIVTSPNQPNLGASVPFASENTDFGGDNKLNSTDEEEIMPLVTRDVSHRHCCQPDTTVRWLKPSLIVTYPGGATRMRLVTTVAVAAVLCFTACLVLFHPHGVGVLAAPVKRYLSSDSAS

SEQ ID NO: 61 - DNA, 1113 bp, Zea mays
  ref <308>: DATABASE ACCESSION NUMBER: GRMZM2G177386
atggcggcggcgatgtgcgtggatgacgaggccgcctccgccgccgcggaaagcgcgggggtcgacaagctggatctcggcgcggccgcgggcggcaagaggagcgtctacctcatggactgcgcgccggtctggggctgcgcgtccacgcgcggccgcagcgccgagatggaggacgcctgcgccgcggccccgcggttcgccgacgtgccggtgcgcctcctcgccagccgcagggacctcgacggcctgggcctcgacgccggcgcgctccgcctgccggcgcacctgttcggcgtcttcgacggccacggcggtgccgaggtggccaactactgccgggagaggctccaggtactcttgaggcaggagctgaggctactcggcgaggatttggggcagattagctgcgacgtggacatgaaggagcactgggacgagctgttcaccggatgcttccagaggctggatgacgaggtgtcagggcaggcgagcaggctcgtcggtgccgtccaggagtcacggccggtggccgccgagaacgtgggctccactgcggttgtcgccgtcgtgtgctcatcccatgtggtggtcgccaactgcggggattcgcgtgccgttctctgccgtgggaaggagccagtagagctgtcgattgatcacaagcctgacaggaaggatgagcgcgcgaggattgaggccctgggaggcaaggtcatccaatggaacggctatagggtctccggtatacttgctatgtcaagatcgattggggaccgatatttgaaaccattcgtcattccaaaaccagaagtcaccgttgttcctagggcgaaagatgacgactgcctcattcttgcaagtgatgggctgtgggatgtagtgtcgaatgaagaggcatgcaaagctgcgcgtcggcagatccagctgtggcacaagaacaacggtgtcacatcatcattgtgtgacgagggtgatgaatccaatgatcctgctgcacaagctgctgctgattatcttatgaggctcgcactgaagaagggtaccgaggacaatatcactgtcattgtggttgacttgaaacctcgaaagaaggccaagagcaactcataa

SEQ ID NO: 62 - protein, 370 aa, Zea mays
  ref <308>: DATABASE ACCESSION NUMBER: GRMZM2G177386
MAAAMCVDDEAASAAAESAGVDKLDLGAAAGGKRSVYLMDCAPVWGCASTRGRSAEMEDACAAAPRFADVPVRLLASRRDLDGLGLDAGALRLPAHLFGVFDGHGGAEVANYCRERLQVLLRQELRLLGEDLGQISCDVDMKEHWDELFTGCFQRLDDEVSGQASRLVGAVQESRPVAAENVGSTAVVAVVCSSHVVVANCGDSRAVLCRGKEPVELSIDHKPDRKDERARIEALGGKVIQWNGYRVSGILAMSRSIGDRYLKPFVIPKPEVTVVPRAKDDDCLILASDGLWDVVSNEEACKAARRQIQLWHKNNGVTSSLCDEGDESNDPAAQAAADYLMRLALKKGTEDNITVIVVDLKPRKKAKSNS

SEQ ID NO: 63 - DNA, 1749 bp, Zea mays
  ref <308>: DATABASE ACCESSION NUMBER: GRMZM2G406674
atggggaagtctccggcgaagtggatcaagtccgtgctcttcgggaaaaggtcgtcgtcgaggtccggctccaccaaggccaaggatttatcgaagggtacgactaacaaagcagcagctgctgctgctgctgctgccgggaaggagcccgcgttctctgagagctctccggtcatctcggagcctgtgcttgttagcgcccacaacaatgagaccgcgcgggaggccgctaagggtgagaattccagcgtgcaagaagtgccagtgactgatgtcagtcaagacttggagaagcagggcactgttgggtctgatacgtctaatgatgctgagaggttgagggaagagcaagcggccgtgaaggcacaagctgccttccgtggttatctggcacgccgagcattccgtgccctgaaagggatcataagactacaggcactgattcggggacatcttgtaaggaggcaagctgtttcaactctccgtgccacatggttgattgtgaagtttcaagcccttgtccgtggaaggaacgttagactttctaatgtttccattcaagcaactacggaactttcccaacagaacttcgggggttctaaacctggttcctggaaggagaagttgtcttcaaatgcatttgctcggaagcttctctcttcaccaattgtggttgaggctcttcacgtccagtatgatgagatggaccctaattcggccttcaattggttagagaggtggacagtaagtcatgtctggaagcctatttcccaaccaaagagagttggcactgatgctaagcctcatacaaggaaggccagttatgcaatggaaacagagtcagcgaaattaaagcgtaatgcacggaagagccctgcagtgccatttgagccttctcaaacaaacaccaccattgaaaatgagaagacaagacggaatccaaggaaattaagtagcactcctgctgagtcagttcccgatggccagttaacagaacttgagaaggttaaacgtagccttaggaaggttactagttccacggttgaaacctcaaaggtgcctagcccaacaactgagattcctgaccgtcaagaggtacaatgtgagagaccactaagaagtgcaaagcaagctccaattcatgttgagaatcaagaacctcagaatgttaatctatcggagaatgcaaagatggatattctggtaccagatatccagcctgacgtggaagttgcttcagatctagtcacaatcacaaatgaagaaaaagttgatgagacaccgtctgttgttgctccagcggctgaaattatgccactgcaagacatcaacagcgaagaaaatgctttggtgaatgatgtggaagagagatccaaagaagaacattcatctactgataacctgaaaggcagcaagaggaggtcttcattctcagctaaacctgaatatccagaaaatggctccaaaaattctccagccctgccaagctacatggctgctacacaatctgcaaaggcgaaactgcgggggaatagttcaccaagacttagctctgattcagcagagaaaaacgggttcactcgtcgtcactcccttccgtcccctaacaatggtaagataatttcacattctccacgtacgcaaaggccaacccatgctggtggcaaggacggagcaaaaggcgacaaggctatgctgtcatcaagagatgcgagcgagagaccactgaaagctgagtggagacgctga

SEQ ID NO: 64 - protein, 582 aa, Zea mays
  ref <308>: DATABASE ACCESSION NUMBER: GRMZM2G406674
MGKSPAKWIKSVLFGKRSSSRSGSTKAKDLSKGTTNKAAAAAAAAAGKEPAFSESSPVISEPVLVSAHNNETAREAAKGENSSVQEVPVTDVSQDLEKQGTVGSDTSNDAERLREEQAAVKAQAAFRGYLARRAFRALKGIIRLQALIRGHLVRRQAVSTLRATWLIVKFQALVRGRNVRLSNVSIQATTELSQQNFGGSKPGSWKEKLSSNAFARKLLSSPIVVEALHVQYDEMDPNSAFNWLERWTVSHVWKPISQPKRVGTDAKPHTRKASYAMETESAKLKRNARKSPAVPFEPSQTNTTIENEKTRRNPRKLSSTPAESVPDGQLTELEKVKRSLRKVTSSTVETSKVPSPTTEIPDRQEVQCERPLRSAKQAPIHVENQEPQNVNLSENAKMDILVPDIQPDVEVASDLVTITNEEKVDETPSVVAPAAEIMPLQDINSEENALVNDVEERSKEEHSSTDNLKGSKRRSSFSAKPEYPENGSKNSPALPSYMAATQSAKAKLRGNSSPRLSSDSAEKNGFTRRHSLPSPNNGKIISHSPRTQRPTHAGGKDGAKGDKAMLSSRDASERPLKAEWRR

SEQ ID NO: 65 - DNA, 1104 bp, Zea mays
  ref <308>: DATABASE ACCESSION NUMBER: GRMZM2G377904
atgttgcgagcgctggcggcgaggtgctgcggccactggccgccgggcgccgcggcggcggacgggatgctgtggcaggcggagctgcggccgcacgcggcgggggagttctcgatggccgcggcgcaggccaacctggccatggaggaccaggcgcaggtgctggcgtccccggccgccacgctcgtcggcgtctacgacggccacggcggggccgacgcatcccggttccttcgctcccggctcttcctgcatgtccaacgcgtcgtgcaggagcaggggggcatgagcgccgaggcgattcggagcgcgttcggcgcggccgaggaggagttccataggcaggtgaggcaggagtggaggagccggccgcggctcgctgccgtgggctcctgctgcctgctcggggccatctccggggacacgctgtacgtggccaacgccggcgattcccgcgccgtgctcggccgtcgagtgcccggcggcggggcggccgtcgccgagcggctctccgccgagcacaacgcggcgtgcgaggaggtgcggcgcgagctcgccgcgctcaaccccgacgacgcgcagatcgttgtgcacgccaggggagcctggagggtcaaggggataattcaggtgtcgagatccattggcgatttttatctcaagaaaccggagtatagcctggaccccttgttccggcaagttggggcccctattgcgctgaagaggccagctctcagcgctgaaccatcagttcaagtacgcaagctgaaaccaaacgacctgttcctgatatttgcttcagatggcctttgggagcacctcagcgacgatgctgcggtgcagattgtcttcaagaatccgagaactgggatagccagcagactggtgaaggctgccttgaaggaagcgaccaggaagagggaggtcaggtaccgtgatctgaggacgatcgagagaggggtgaggcggcatttccacgacgacatcagcgtcgtcgtggtctacctcgatggccaccgcgagcgccgccacaccagggtcgttgactcgagcagcaactgcaccagtgcgcccgtcgacatccactcctccaactcccgctag

SEQ ID NO: 66 - protein, 367 aa, Zea mays
  ref <308>: DATABASE ACCESSION NUMBER: GRMZM2G377904
MLRALAARCCGHWPPGAAAADGMLWQAELRPHAAGEFSMAAAQANLAMEDQAQVLASPAATLVGVYDGHGGADASRFLRSRLFLHVQRVVQEQGGMSAEAIRSAFGAAEEEFHRQVRQEWRSRPRLAAVGSCCLLGAISGDTLYVANAGDSRAVLGRRVPGGGAAVAERLSAEHNAACEEVRRELAALNPDDAQIVVHARGAWRVKGIIQVSRSIGDFYLKKPEYSLDPLFRQVGAPIALKRPALSAEPSVQVRKLKPNDLFLIFASDGLWEHLSDDAAVQIVFKNPRTGIASRLVKAALKEATRKREVRYRDLRTIERGVRRHFHDDISVVVVYLDGHRERRHTRVVDSSSNCTSAPVDIHSSNSR

SEQ ID NO: 67 - DNA, 1443 bp, Zea mays
  ref <308>: DATABASE ACCESSION NUMBER: GRMZM2G030762
atgaactgcgggccgcccgaccagctgccgccggggtcggcgccgtcgtgcttcctcaacctgaactgggaccagtctatggccgccgaccagctcgacccggcgctcagctcgatggtctcctccccggcgtccaactcgacggccgccgccgcggttactgacggccgcgctctccacgggatctctccgcagcagcagtacggaggcactccgctcagctcgccccccaagctcaacctgttccaccaaactcgcccccagttccaccacttcccgccgccgcaggtcggcggcctgccaatcctggagaacctgatgccgatgggccatctagaccagttcctcgccgacccaggcttcgccgagcgcgcggcgcggctgtccggcttcgacggccgccccggtggaagtggctatggaggcgtcggcgtcccgggacagtttggcatcccggacgccggccccatcggcgcattgaaggagctggagctcgggaacggccgggacgagtcgtcggtgtccgatccggcgtccggcagcgcggagatggcgctcaacaaggggccttccgacggcaatgcgaagaaacggaaggctagcgggaagggcaaaggcaaggacggccccgggtccgccgccgccggcgccgccaaggaggagtcgagtgggaagcggtgccgatcggcggacgagagcagtggcgcggaggacaacaaccccaccaccaagggcaaggccgcgcagagcagtagcgagaatggtggtggcaggaagcagcaggggaaggagagcgcgacgaagccccccgccgaggcgcccaaggactacatccatgtccgggcgcggcgcggcgaggcgacggacagccacagcctcgcggagagggtgagaagggagaagatcagccagcggatgaagctgctgcaggatctcgtgccgggttgcaacaaggtggtgggcaaggcagtgatgctggacgaaatcataaactacgtgcagtccctgcaacggcaagtcgagttcctgtccatgaaactggccaccgtgaacccgcagctggacttcaacagcctgcccaacctcctcctccctaaagacatacaccagccctgtgggccgccgcatttcccgctggagacctcaggcgctccgctgccgtacctgagccagcctcaccatgggagccctctaggctgctgcatggacacccaggggggctctatgcacccgctcgacgcggcgttctgccggccgatgaaccctcagcatcctttcctcaacggtgctagcgacgcggcgtctcaggtcgggactttctggcaagacgaccttcaaagcgtggttcacatggacatcggccaaagccaggagatcgctcccacctcttccaacagctacaacggttcattgcagacagtccacatgaaaatggagctttga

SEQ ID NO: 68 - protein, 480 aa, Zea mays
  ref <308>: DATABASE ACCESSION NUMBER: GRMZM2G030762
MNCGPPDQLPPGSAPSCFLNLNWDQSMAADQLDPALSSMVSSPASNSTAAAAVTDGRALHGISPQQQYGGTPLSSPPKLNLFHQTRPQFHHFPPPQVGGLPILENLMPMGHLDQFLADPGFAERAARLSGFDGRPGGSGYGGVGVPGQFGIPDAGPIGALKELELGNGRDESSVSDPASGSAEMALNKGPSDGNAKKRKASGKGKGKDGPGSAAAGAAKEESSGKRCRSADESSGAEDNNPTTKGKAAQSSSENGGGRKQQGKESATKPPAEAPKDYIHVRARRGEATDSHSLAERVRREKISQRMKLLQDLVPGCNKVVGKAVMLDEIINYVQSLQRQVEFLSMKLATVNPQLDFNSLPNLLLPKDIHQPCGPPHFPLETSGAPLPYLSQPHHGSPLGCCMDTQGGSMHPLDAAFCRPMNPQHPFLNGASDAASQVGTFWQDDLQSVVHMDIGQSQEIAPTSSNSYNGSLQTVHMKMEL

SEQ ID NO: 69 - DNA, 1404 bp, Zea mays
  ref <308>: DATABASE ACCESSION NUMBER: GRMZM2G159937
atggcgtggtcggagacggacgccgcgctgttcgcggcggtgctggggcgggacgcggcgcaccacctgagcaccacgccgccgcaccaggacgcgcccgcggcgtcggcccccgagctccaggcgcgcctgcaggacctcgtggagcggggcggggcgtggacgtacggcatcttctggcaggagtcctgcgccggcggccgcgccgtgctcggctggggcgacggccactgccgcgacggcggcgccccgcaccacgacgacgcggaccggagcgtggcgcggaagcgcgcgctgctgcggctgcacgcgctctacggcggcggggacgacgagggggccgactacgcgctccgcctcgaccgggtcaccgccgccgagatgtactttctggcgtccatgtacttctccttcccggagggcgcgggcgggccgggccacgcgctcgccacggcccgccacgcctgggccaccgtcgaccccgcgcccgggtggtacgtccgggcgtccctcgcccagtccgcggggctccgcaccgtcgtcttcctcccgtgcaagggcggcgtcctcgagctcggctccgccgtgcccgtccgcgagactcccgagaccctgcgcgcgctccagaccgcgctcgctgtcgcgcggcccccggcacgcgaggaatgcatgaggatcttcggccaggacctctcccccggcgggagcgcccgagccccgcgcagcgtcgacaattgggctccacatccacacctcgccgcccaagccaccgccgcgtccgcactagccagcaaggaagccgccgcgggacacaaggctccggagccgcccaggagcatagacttcagcaagccagggaagcctgggcacgggcaggccggcggcgaggagcggaggccgcggaagcgcgggcggaagccggcgaacgggcgggaggagccactgaaccacgtggaggcggagcggcagcggcgggagaagctgaaccagcggttctacgccctgcgcgccgtcgtccccaagatttccaagatggacaaggcgtcgttgctcagcgacgccatcgcgtacatccaggagctggaggaccggctccgcggcggcggcggcggcggcggcggctgctcggcggcgcgcccggacagcccggacgtggaggtgaaggcaatgcaggacgaggtggtgctgcgcgtgaccacgcccctgtacgcgcaccccgtctccagggtgttccacgccatcagggacgccgagctgatcgtggcggcgtcggacgtggcggtggcggacgaagccgtcacgcacacgctcgtgctgcggtcgcccggccccgagcagctcaccgcggagacggtactcgccgccatgtcacgggggatgaccagcgccaccccctccccgtga

SEQ ID NO: 70 - protein, 467 aa, Zea mays
  ref <308>: DATABASE ACCESSION NUMBER: GRMZM2G159937
MAWSETDAALFAAVLGRDAAHHLSTTPPHQDAPAASAPELQARLQDLVERGGAWTYGIFWQESCAGGRAVLGWGDGHCRDGGAPHHDDADRSVARKRALLRLHALYGGGDDEGADYALRLDRVTAAEMYFLASMYFSFPEGAGGPGHALATARHAWATVDPAPGWYVRASLAQSAGLRTVVFLPCKGGVLELGSAVPVRETPETLRALQTALAVARPPAREECMRIFGQDLSPGGSARAPRSVDNWAPHPHLAAQATAASALASKEAAAGHKAPEPPRSIDFSKPGKPGHGQAGGEERRPRKRGRKPANGREEPLNHVEAERQRREKLNQRFYALRAVVPKISKMDKASLLSDAIAYIQELEDRLRGGGGGGGGCSAARPDSPDVEVKAMQDEVVLRVTTPLYAHPVSRVFHAIRDAELIVAASDVAVADEAVTHTLVLRSPGPEQLTAETVLAAMSRGMTSATPSP

SEQ ID NO: 71 - DNA, 1764 bp, Zea mays
  ref <308>: DATABASE ACCESSION NUMBER: GRMZM2G154641
atgtcgtccgccgcgggcgggtatggcggcggcggcggcgcgggaagcggcgccgagccccacggccacgccgacttcctgctgcaccaccatgcacagcacgtcgccgcgcagcagctctaccacgtgccccagcacagccgccgcgagaagctgcggttcccccaagacgacgcgcccccacacgcctccgcttccgtcccgcagcagcacggcggggcggtggcctggccgccgcctccgccgccaccggcgttctactcctacgcgtcctcttccacgtcgtcctactccccgcacagccccacgctggcgcaggcacagctcgtcgtggcgcacggcctcgccccgccgctctcgtcgcagatcccgacgcagaacttcgcgctctcgctctcctcctcgtcctcgaacccgccgcccccgcccccgcagccgaggaggcctcacgccgcgcccttcgggcccttcaccggctacgcggctgtgctcgggcgctcccgtttcctcctccccgcggagaagctgctcgaggagatctgcgacgtcgggggcgcggcctcgcgcgtggaccgcagcgcctccgacgagggcctgctcgacgctgacccgatggaatccatcgatcacgaaatggacggcgccgaccgcgtcgccaatgacgctggcccaatctccggcgccgagcagcagtggaagaagactaggctcatctctatgatggaagaggtttgcaagcggtaccggctgtactaccagcaggttcacacggtgatcaactcgttcgagacggtcgccgggttcagcaacgctgccccgttcgcggcgatggcgctgagagccatggcgaagcacttcaagtgcttgaagggcatgatactgagccagctgcgcaacatcaccaaggcccctgccggcaaggaggggctcagcaaggacatcgccatgttcgggcttgccggtggtagcgcggccgccctccagagaggtagcagtgtgggtgccttcggccagccgcacaacatctggcggccacagagagggctgccggagcgtgcggtgtctgttctccgcgcttggctcttcgaacacttcctgcacccatatcctactgatggagacaagcaaatgcttgctaaacaaacgggtttaacacggaaccaggtatccaactggtttataaatgcaagggttcgtctttggaaaccaatggtggaagagatccacaaccttgagatgaggcaggtgcacaaacaccctgttctcgacaagggccagcacgtgctgcatcaccaaacccagcattcgttcgagagcagtggaaagccttctgacccttccgactctcagcttggccaaagcagcagcatcacgaggaaccacaacatccctgcgtcccagggatttgccgatgagctctccgagatgtcccattctattcagcaggggcaggtaaccttcgcatacaatgggatgtcggcgccacaccacagcctcgcttcgtcacagcaccaccagcaggccgggccgatgagcggcattggtggcgcggggaacggtggcgtctccctcaccctcggcctccaccagaacaacagagtctgcatagccgagccactcccggcgtccgtccctcccaacctcgctcaccgttttgggttggaggaggtcagcgacccctacatgatgggctctttcgggaaccaggaccggcatttcggcaaggagattggcggccatttggtgcatgattttgttggctga

SEQ ID NO: 72 - protein, 587 aa, Zea mays
  ref <308>: DATABASE ACCESSION NUMBER: GRMZM2G154641
MSSAAGGYGGGGGAGSGAEPHGHADFLLHHHAQHVAAQQLYHVPQHSRREKLRFPQDDAPPHASASVPQQHGGAVAWPPPPPPPAFYSYASSSTSSYSPHSPTLAQAQLVVAHGLAPPLSSQIPTQNFALSLSSSSSNPPPPPPQPRRPHAAPFGPFTGYAAVLGRSRFLLPAEKLLEEICDVGGAASRVDRSASDEGLLDADPMESIDHEMDGADRVANDAGPISGAEQQWKKTRLISMMEEVCKRYRLYYQQVHTVINSFETVAGFSNAAPFAAMALRAMAKHFKCLKGMILSQLRNITKAPAGKEGLSKDIAMFGLAGGSAAALQRGSSVGAFGQPHNIWRPQRGLPERAVSVLRAWLFEHFLHPYPTDGDKQMLAKQTGLTRNQVSNWFINARVRLWKPMVEEIHNLEMRQVHKHPVLDKGQHVLHHQTQHSFESSGKPSDPSDSQLGQSSSITRNHNIPASQGFADELSEMSHSIQQGQVTFAYNGMSAPHHSLASSQHHQQAGPMSGIGGAGNGGVSLTLGLHQNNRVCIAEPLPASVPPNLAHRFGLEEVSDPYMMGSFGNQDRHFGKEIGGHLVHDFVG

SEQ ID NO: 73 - DNA, 3162 bp, Zea mays
  ref <308>: DATABASE ACCESSION NUMBER: GRMZM2G160005
atgaaggatcacggatcgggcggcgtcactcccagccccgcagaaggggaaaagaaacccatcaactcggagctgtggcacgcttgtgcggggcccctggtgtcgttgcccccggtgggcagtctcgtcgtatacttcccgcagggccatagtgaacaggttgctgcttcaatgcataaggagctggacaccgtccccagctacccatctctgccttctaagttgatctgcaagctcctaagtctcaccttacatgcagattctgaaactgatgaagtttatgcccagatgatgcttcagcctgtgaacaaatatgatcgagacgcaatgctggcatctgaactgggtctgaaacaaaacaagcaaccaacagaattcttttgcaagacgttgacagcaagcgacacaagtacgcatgggggattctcagtgccacgccgtgcagctgagaagatatttccaccgctagactttacgatgcaaccaccagcccaagaactcattgccaaggatctgcatgatatttcatggaaatttcgacatatctatcgaggtcaaccgaagaggcatcttttgacaactggttggagtgtcttcgtcagtacaaaaaggctgttagccggtgattcagttctctttataagggacgagaaatctcaacttctcttaggtataaggcgtgctagcagaccccaaccagctctgtcatcatcagttttatcaagtgacagcatgcacattggaatccttgcagcagcagcccatgctgccgcaaatagtagcccatttactattttctataacccaagggcaagcccatcagaatttgtcatccctttagcaaaatacaataaggctttgtatacacaagtgtcccttggaatgcgattcagaatgctctttgagacagaggattcaggggtaagaagatacatgggcacgatcacaggcattggcgacttagatccactgcgatggaagaattctcattggcgaaaccttcaggttggttgggatgaatcgactgcatctgagaggcgcacccgtgtttcgatatgggagattgaaccagttgctacaccattttatatatgcccaccaccatttttcaggccaaagcttcctaagcaagcaggaatgccagatgatgaaaacgaggttgagagtgctttcaaaagagcgatgccatggcttgctgatgacttcgctctgaaagatgtccaaaatgcattatttccaggcctgagcctagttcaatggatggctatgcagcaaaatcctcagatgctagcaactgcttcccctgctgtacagtcgcagtacttgacctctaatgcactgggtatgcaggatgggataggcagtgtcagtgaagatccaacaaaaagattgactatgcaggcccaaaatattggcttacctaatttacaggctggttcgaaagtggaccaccctgcaattaccccattagctcaacaccagcaacagcctcaccatgtattgcaacaacagcaggtccaaccactgcagcaaagttctgcgatcctacagcaacagcaagcccagttgttgcagcaaaatgccattcacttgcagcagcagcaagaacaactccaacggcaacaatcacagccgcagcaacagttcaaagctactgcatgtcttcagtcatcggatcagcacaagctgaaagagcaacagccttcaggtggacaagctgcctcacaagtacatttgttaaaccagattttgcaaccatcttcatctcagctacaacagctgggtttacccaagtcacctactcagcgcccagggttaccaagtctaacaacaatgggttctttgcagcagtcacaattacctcagactccacagccgcaacaaacagcagaataccaccaggcactcctacaaagtcaacaaccccaactacaacagctatcacaatcagaactgcagctgcagctgcttcaaaagattcaacaacaaaatctgctatctcaactgaacccacagcatcagtcccagctgatccaacaattgtctcagaaaagccaggaaattctccagcaacaagttcttcaacatcagtttggtggtgctgatgccatgggtcagctcaaacatttacagcaaacacctttgaaccataatacaggatccttgccaccccagcaacttgtaagatcacactcagcactcactgagagcgaagaaccttccagctcaacagttccatctggcagccgtatctccccaataaattcatttagtagagcaaaccaaggaaccagaaatttgcctgagatgccagcaacaccgcacattgagcacttacttcaggaaattcaaagtaagacagataatcgaatcaagaatgatatacaaggtagtaaggaaacggtccatgcacctaatcgtcatctagcttcagatcaacttgatgcgtcatctgctacctccttttgcttagatgagagcccacgagaaggcttttcctttcctccagtttgtttggataacaatgttcaagttgatccaagagagaattttcttattgcggaaaatgtggacacattaatgcctgacgccctgttgtcaagagggatgtcgtctggaaagggtatatgcaatctaccttctggacaaagggatcatagggatgtggaaaacgagctatcctctgctgcattcagctcccagtcatttggtgtgccggacatgtcttttaagcctggatgttcaagtgatgttgctgttgctgatggtggaatggcaagccaaggactgtggaatagtcaaacacagcggatgagaaccttcaccaaggttcaaaagcgtggatccgttgggagatcaattgatataacacggtaccgaggttacgaagatcttcggcatgatcttgcatgcatgttcggtattcaagggcagcttgaagatccctacaggacggactggaagctggtctatgttgaccacgaaaatgacatcctccttgttggcgacgacccatgggaggagtttgtaagctgtgtcaagagcattaaaatattgtcatctgttgaagtacagcaaatgagcttggatggtgaccttggctgcatccctcaaactcaagcctgtagtgcttctgatgacgcaaatgcatggagggcctga

SEQ ID NO: 74 - protein, 1053 aa, Zea mays
  ref <308>: DATABASE ACCESSION NUMBER: GRMZM2G160005
MKDHGSGGVTPSPAEGEKKPINSELWHACAGPLVSLPPVGSLVVYFPQGHSEQVAASMHKELDTVPSYPSLPSKLICKLLSLTLHADSETDEVYAQMMLQPVNKYDRDAMLASELGLKQNKQPTEFFCKTLTASDTSTHGGFSVPRRAAEKIFPPLDFTMQPPAQELIAKDLHDISWKFRHIYRGQPKRHLLTTGWSVFVSTKRLLAGDSVLFIRDEKSQLLLGIRRASRPQPALSSSVLSSDSMHIGILAAAAHAAANSSPFTIFYNPRASPSEFVIPLAKYNKALYTQVSLGMRFRMLFETEDSGVRRYMGTITGIGDLDPLRWKNSHWRNLQVGWDESTASERRTRVSIWEIEPVATPFYICPPPFFRPKLPKQAGMPDDENEVESAFKRAMPWLADDFALKDVQNALFPGLSLVQWMAMQQNPQMLATASPAVQSQYLTSNALGMQDGIGSVSEDPTKRLTMQAQNIGLPNLQAGSKVDHPAITPLAQHQQQPHHVLQQQQVQPLQQSSAILQQQQAQLLQQNAIHLQQQQEQLQRQQSQPQQQFKATACLQSSDQHKLKEQQPSGGQAASQVHLLNQILQPSSSQLQQLGLPKSPTQRPGLPSLTTMGSLQQSQLPQTPQPQQTAEYHQALLQSQQPQLQQLSQSELQLQLLQKIQQQNLLSQLNPQHQSQLIQQLSQKSQEILQQQVLQHQFGGADAMGQLKHLQQTPLNHNTGSLPPQQLVRSHSALTESEEPSSSTVPSGSRISPINSFSRANQGTRNLPEMPATPHIEHLLQEIQSKTDNRIKNDIQGSKETVHAPNRHLASDQLDASSATSFCLDESPREGFSFPPVCLDNNVQVDPRENFLIAENVDTLMPDALLSRGMSSGKGICNLPSGQRDHRDVENELSSAAFSSQSFGVPDMSFKPGCSSDVAVADGGMASQGLWNSQTQRMRTFTKVQKRGSVGRSIDITRYRGYEDLRHDLACMFGIQGQLEDPYRTDWKLVYVDHENDILLVGDDPWEEFVSCVKSIKILSSVEVQQMSLDGDLGCIPQTQACSASDDANAWRA

SEQ ID NO: 75 - DNA, 693 bp, Zea mays
  ref <308>: DATABASE ACCESSION NUMBER: GRMZM2G143402
atggatcggttggaggagcggaacattaagaagggggagagggagatggaggaggcgcgcaaggaagaggagcggaaggaggaggcgggggacaggaatacccaggagccgcagcaaggtcaaggcctcagcctctcactcgccaacggcagcgacagcggcaggtctggaatgttgccgatgtcgaacccttcagctaatcccacacagcttacaattttctatggtggatcagtatgtgtgtatgactcggtgccaccagaaaaggctcaggcaatcatgcttatagctgcggctgcagcagctgcggcagccaccaaaggcagtgctgccactgcttttaatcctccaatggtacatacagacactgtcgccccagcagcagtcttctctcctgtgcttacacggtctccatcactgcagagcacttctgtagcagctggacaagctcaggttgttgctgaccctagctcaataagcaagcttcaggctgatctccccattgccaggaggcactctctccagcgcttccttgagaaacgtcgtgacagggtcgtgagcaaagctccgtacagccccgccaagtcgttcgatggcatggagtcagcgggaatggagatgactgcggacggcaagcagggcgcaaggcccagtatcttgaaaggttggggagccgcgaagtctgaagtctga

SEQ ID NO: 76 - protein, 230 aa, Zea mays
  ref <308>: DATABASE ACCESSION NUMBER: GRMZM2G143402
MDRLEERNIKKGEREMEEARKEEERKEEAGDRNTQEPQQGQGLSLSLANGSDSGRSGMLPMSNPSANPTQLTIFYGGSVCVYDSVPPEKAQAIMLIAAAAAAAAATKGSAATAFNPPMVHTDTVAPAAVFSPVLTRSPSLQSTSVAAGQAQVVADPSSISKLQADLPIARRHSLQRFLEKRRDRVVSKAPYSPAKSFDGMESAGMEMTADGKQGARPSILKGWGAAKSEV

SEQ ID NO: 77 - DNA, 1998 bp, Zea mays
  ref <308>: DATABASE ACCESSION NUMBER: GRMZM2G125777
atgaaccatccgtcctcgtcgtcgtcctccgcccagccgccgccagccccggcggtggcggccgaggccacctccctcgcgccgggcttccgcttccaccccaccgatgaggagctcgtctcctactacctcaagcgcaaggtcctcggccgcccgctcaaggttgatgccatcgccgatgtggacctttacaagctcgagccctgggacctgcccgcccgctcccgcctccgctcccgcgactcccagtggtatttcttcagccgcctcgaccgcaagcacgccaaccgcgcccgcaccaaccgcgccacgtcgggagggtactggaagaccaccgggaaggacagggaggtgcgccatgggcccagacttgtcgggatgaagaagacgctcgtcttccacgcgggacgcgcccccaagggcgaacgcaccaactgggtcatgcacgaataccgcctcgagggcgatgacgccgcagggataccgcaggactcatttgtggtgtgccggatcttccagaaagctggaccaggtcctcagaatggcgcacagtatggagcgcctttcgttgaggaggaatgggaggaggatgacacagatgatggtttgcttccagtggagggtgttgctgctgctgaccctgaggttccccttgcttctgtggagatccctggtgctttggatagaggctatcttcaaatgagtgatctcattcagggtttggatgatcaaaatggaaatggtacacctagtttgccagtttctgatacttcaaataatagcaaccattctgaagacgtagatggaaattctggggacattttaagtgacccaaaccttggctctaattttcttcagtatgctgaacctggggagcaaaatagcttaatgcttaatggaactatcatatcaaatgcaaatgctggagatttttttgataattccagccacagtgatgggtttctagagctgaaggattttggagatgctgcaaatctggatttccctttgggcaatggatcatccatctggcctttggattgttgggcatggaaaacacctgactcagcggaatctttaaatggaactaatgatgagattcctccacttcctgatgaccagactttccagccagatgagctggaacaactgttacagtcaatacaagaagattcccatttaggctcaagtatcattgaccccccacattcttctatgacaaattcagttctgcctgatgaggattgtttgatgttctatgatgcaccgttcgattccaccatgtgtgatgatgggtttgcacagaatgggatccttggctctgcagcaaccaatctatctggtattggcatggtggacgatggtatgccatactttgatgcaatggatggtaatttatttaatgacattctgggctccatacagcagccagatggtagcagttcccatgcttttaatggcccagtccttacccaagaggtcaacaataccatgtttacatatagtccaactcaaaaggttttagaacctaatattgtagttggcgcaccatcgtctgctaggttacctgaagctggtagtcagttaaattgtgttgttttaccagatggtcaggctaagagtagtactattggaaagggatttgtaaggattttggattcgatctctgctcccccagcttttgcaggagagttcccatctaaccaccgcaaatccttggctcgtatttctggagcgcgccccaacacactccatgtttctgctgaagtgatccatataggaagtttagctgttccttctggcgcagataagtgggcgctgcaaaaggatcaaggcatggagctgctcttctctgcagattttgaacctgatgcccgtatacattgtggctgcaacaccattaccgcggtgctgcgtggtggcttctgccttttcttcgtttcagcaataatgctcttagtgagctacgaggtgggcatgtgcatctatggcaagtag

SEQ ID NO: 78 - protein, 665 aa, Zea mays
  ref <308>: DATABASE ACCESSION NUMBER: GRMZM2G125777
MNHPSSSSSSAQPPPAPAVAAEATSLAPGFRFHPTDEELVSYYLKRKVLGRPLKVDAIADVDLYKLEPWDLPARSRLRSRDSQWYFFSRLDRKHANRARTNRATSGGYWKTTGKDREVRHGPRLVGMKKTLVFHAGRAPKGERTNWVMHEYRLEGDDAAGIPQDSFVVCRIFQKAGPGPQNGAQYGAPFVEEEWEEDDTDDGLLPVEGVAAADPEVPLASVEIPGALDRGYLQMSDLIQGLDDQNGNGTPSLPVSDTSNNSNHSEDVDGNSGDILSDPNLGSNFLQYAEPGEQNSLMLNGTIISNANAGDFFDNSSHSDGFLELKDFGDAANLDFPLGNGSSIWPLDCWAWKTPDSAESLNGTNDEIPPLPDDQTFQPDELEQLLQSIQEDSHLGSSIIDPPHSSMTNSVLPDEDCLMFYDAPFDSTMCDDGFAQNGILGSAATNLSGIGMVDDGMPYFDAMDGNLFNDILGSIQQPDGSSSHAFNGPVLTQEVNNTMFTYSPTQKVLEPNIVVGAPSSARLPEAGSQLNCVVLPDGQAKSSTIGKGFVRILDSISAPPAFAGEFPSNHRKSLARISGARPNTLHVSAEVIHIGSLAVPSGADKWALQKDQGMELLFSADFEPDARIHCGCNTITAVLRGGFCLFFVSAIMLLVSYEVGMCIYGK

SEQ ID NO: 79 - DNA, 690 bp, Zea mays
  ref <308>: DATABASE ACCESSION NUMBER: GRMZM2G112629
atgaagagccggaggcagagcagcgggggcagctcgggcgcctgcgccgcgggggagaggaacgcgcacagcagcggcggggggtgcaagctggagaggaaggacgtggagaagaaccggaggctgcacatgaagggcctctgcctcaagctctcctccctcatccctcccgccgccgccaccacgcacgcctccctcctctccgacgccgcgtcggcggcggtgtcctccaatcccggcaacaagcaggacgcggtgacgcagctggaccagctggacagcgcggcggcgtacatcaagcagctcaaggagcggatcgaggcgctgaagcagcggaaggcgggctgctgcaacggcggcggcgcggccacggaggctgcaacggcggcggccgggtccaccggcggcggcggaggcgtgcgcatgccggtcatcgaggtgcggtgccaggacgggacgctggacgtggtgctcatcagcgaggccgccaggcccttcaagctgcacgaggtcatcaccgtgctggagcaggagggcgccgaggtggtcagcgccagcttctccgtcatcggggacaagatattctacaccgtccactcgcaggcgctcagccccaggatcggcgtcgacgccgccagggtctcccagaggctgcacgcgctgctgcttgctccgacgatcctcgtctga

SEQ ID NO: 80 - protein, 229 aa, Zea mays
  ref <308>: DATABASE ACCESSION NUMBER: GRMZM2G112629
MKSRRQSSGGSSGACAAGERNAHSSGGGCKLERKDVEKNRRLHMKGLCLKLSSLIPPAAATTHASLLSDAASAAVSSNPGNKQDAVTQLDQLDSAAAYIKQLKERIEALKQRKAGCCNGGGAATEAATAAAGSTGGGGGVRMPVIEVRCQDGTLDVVLISEAARPFKLHEVITVLEQEGAEVVSASFSVIGDKIFYTVHSQALSPRIGVDAARVSQRLHALLLAPTILV

SEQ ID NO: 81 - DNA, 2508 bp, Zea mays
  ref <308>: DATABASE ACCESSION NUMBER: GRMZM2G469551
atgcggagcgggagcagcgatggcggcggcgggtacgagaagagcgggatggacacgggcaagtacgtgcggtacacgccggagcaggtggaggcgctggagcgggtgtacgccgagtgccccaagcccagctccgcgcgcaggcagcagctgctacgcgagtgccccatcctctcaaacatcgaggccaagcagattaaagtctggttccagaaccggaggtgccgtgacaagcaacgcaatgagtcttcgaggctccagtccgtgaacagaaagttgactgcaatgaacaagcttctcatggaggagaatgagcgattgcagaagcaggtttcccagctggttcacgagaatgcgtacatgaagcagcagctgcagaatccgtcactggcaactgatgcgagctgtgagtcaaatgcgaccactcctgcaaacctaagggatgcgagtaacccatcagggctccttgcaattgcagaggagaccttgacagagttcctctcaaaggctacagggactgctattgattgggtccagatgcctgggatgaagcctggtccggattcttttggtattgtgaccatttcacatggtggccgtggtgtcgctgcccgtgcctgtggtctggtgaacctagaaccaacaaagatagtggaaatcttgaaagatcgtccatcttggtttcgtgattgtcggagtcttgaagtctatacaatgttaccagctggaaatggtggaaccattgaacttgtttacatgcagatgtatgctcctactactttagttcctgcacgtgacttttggacactgagatacacaaccactatggaggacggcagtcttgtggtctgtgagagatccttaagtggttcaggagatggtcaaagtgctgccacaacacaacaatttgtaagagctgagatgcttcctagtggctatttagttcgccaatgtgagggtgggggctcgattgtgcgaatagtggaccatctggatcttgacgcttggagtgttcctgaagttcttcgtcccctctacgagtcgtctcgggtggttgcccagaagatgacaaccacagcgctacggcaccttagacaaattgctcaagaaacaagtggagaggttgtatatgcgctaggaaggcagccagctgttctacggacatttagtcagaggctgagtagaggctttaatgatgctataagtggtttcaatgatgatggttggtccgttatgtgtggagatggcatggaagatgttatcattgcttgcaactcgaagaagatcaggagcagtagcaatcctgctactggttttggagcccctggacctggaggtatcatatgcgctaaagcatcaatgttgctgcagagtgttccaccagcagtccttgttaggttcctgagggaacatcgatctgagtgggcagattataactttgatgcgtattcagcttcagcattgaaaacaagcccttgttcccttcctgggttgcggcctatgaggttttctgggagtcagatcatcatgccccttgctcacacggtggagaatgaggagatcttagaagttgttcgtcttgaaggacagactcttacacatgacgagggccttttgtctagagatatacatctgcttcagctttgcactggaatggacgagaaatcaatgggatcctgcttccagcttgtctttgcaccaatcgatgagcttttccctgatgatgctccattggtatcttcaggctttcgcgtgatcccgttggacataaaaacagacggaccaccctctggaagaacgttggatttggcctctagccttgaagttggcgcaaccacgcaacaagtggcagggaatggatctcaggacgtttgcaacctgagatctgtgctgacaattgcctttcagtttccctatgaaacacatctccaggacaccgttgcagctatggcccggcaatatgttcgaagcatcgtttctgcggttcaaagagtatcaatggccatttctccctcccattctggcttgaatactgctgggcagaagttaatttctggctcccccgaagctgctacacttgttcgctggatttgccaaagctaccggtatcacttgggggtggatttggtcagccactcggatcaagctggggaatcacttttgagaatgttctgggaccatcaagacgctgtcttgtgctgctctttcaaggaaaagcctgtgtttactttcggcaaccagatgggagttgacatgttagaaacgactttagtcgctctgcaagatctcacccttgacaagatctttgacgagcctggtagaaaggcactacatgcggaggttccgaaactgatggaacagggctatgcgtacctgccggctggggtgtgcctgtctgggatgggccgccatgtctcctacgagcaagctgttgcttggaaagttctcggtgaggacggcaacgtgcattgcctcgctttctgtttcgtcaactggtccttcatctga

SEQ ID NO: 82 - protein, 835 aa, Zea mays
  ref <308>: DATABASE ACCESSION NUMBER: GRMZM2G469551
MRSGSSDGGGGYEKSGMDTGKYVRYTPEQVEALERVYAECPKPSSARRQQLLRECPILSNIEAKQIKVWFQNRRCRDKQRNESSRLQSVNRKLTAMNKLLMEENERLQKQVSQLVHENAYMKQQLQNPSLATDASCESNATTPANLRDASNPSGLLAIAEETLTEFLSKATGTAIDWVQMPGMKPGPDSFGIVTISHGGRGVAARACGLVNLEPTKIVEILKDRPSWFRDCRSLEVYTMLPAGNGGTIELVYMQMYAPTTLVPARDFWTLRYTTTMEDGSLVVCERSLSGSGDGQSAATTQQFVRAEMLPSGYLVRQCEGGGSIVRIVDHLDLDAWSVPEVLRPLYESSRVVAQKMTTTALRHLRQIAQETSGEVVYALGRQPAVLRTFSQRLSRGFNDAISGFNDDGWSVMCGDGMEDVIIACNSKKIRSSSNPATGFGAPGPGGIICAKASMLLQSVPPAVLVRFLREHRSEWADYNFDAYSASALKTSPCSLPGLRPMRFSGSQIIMPLAHTVENEEILEVVRLEGQTLTHDEGLLSRDIHLLQLCTGMDEKSMGSCFQLVFAPIDELFPDDAPLVSSGFRVIPLDIKTDGPPSGRTLDLASSLEVGATTQQVAGNGSQDVCNLRSVLTIAFQFPYETHLQDTVAAMARQYVRSIVSAVQRVSMAISPSHSGLNTAGQKLISGSPEAATLVRWICQSYRYHLGVDLVSHSDQAGESLLRMFWDHQDAVLCCSFKEKPVFTFGNQMGVDMLETTLVALQDLTLDKIFDEPGRKALHAEVPKLMEQGYAYLPAGVCLSGMGRHVSYEQAVAWKVLGEDGNVHCLAFCFVNWSFI

SEQ ID NO: 83 - DNA, 2592 bp, Zea mays
  ref <308>: DATABASE ACCESSION NUMBER: GRMZM2G116658
atgagcttcggcggcatgttcgacggcgccggctccggcgtcttctcctacgacgctaccggcggcggcacgggcatgcacaaccccggccgcctcgtcccggccccgcccctgccgaaacctggcggattcggcgccacgggtctctccctcgggctgcaaacgaacatggaaggggctcagctgggcgacttgggtcgtatgggcctgattggcggcggcgggagcgggagcggaggcgacggggactcgctgggccgcggccgtgaggacgagatcgacagccggtcaggcagcgacaacgtcgacggcgcctccggtgacgagatcgacccggacaacagtaaccctcgcaggaagaagaagcgataccaccgccacacaccgcagcaaatccaagaactcgaagctgtgttcaaggagtgcccccaccccgacgagaagcaaaggatggagctcagcaagcggctcaacctagagagccgccaggtcaagttctggttccagaaccgccgcacgcagatgaagacgcagatcgagcggcacgagaacgcgctgctgaggcaggagaacgacaagctgagggcggagaacatgacgatccgggaggcgatgcgcaaccccatctgcgccaactgtggcggcgcggccgtgctcggggaggtgtcgctggaggagcagcacctccgcatagagaacgcgcggctcaaggacgagctggaccgcgtctgcgccctcgccggcaagttcctcggccgcccaatctcctctggcagctccatgtcgtcgtccctgcaaggctgctccggcctcgagctcgccgtcggctccaacaacggctacgggcccggtcccctcggcgcgtcagcgctgcagcccctccccgacctactcggcgccggccttccgggccccgtgggctcggccgccatgcgcttgcccatgggcattggcgccctcgacgttgcgctgcacggggcggccgccgacggcatcgaccgcaccgtcctcctcgagctggcgctcgccgcgatggaggagctcatgaaagtggcgcagatggacgagccgctctggctccgcagtcccgacggcagcggcttggaggcgctcaacctcgacgagtaccaccgagcgttcgccagggtgttcgggccgagccccgcgggctacgtcaccgaggctacccgcgaggccggcgtcgccataaccagcagcgtagacctcgtagacagcctcatggacgcggctcggtggtcggagatgttcccgtgcatcgtggcgagggcgagcacgacggacatcatctcgagcggcatgggcggcacgcgcagcgggtcaatccagctgatgcacgcggagctgcaggtgctgtcgccgctggtgccgatccgtgaggtggtgttccttcggttctgcaagcagcacgccgaggggctgtgggccgtggtcgacgtctcggtggacgccatcctccggcccgacggcggccaccaccacgcgcagaacggcggcggcgccgggtacatgggctgccgcctgctccccaccggctgcatcgtgcaagacatgaacaacggctactccaaggtcacgtgggttgtccacgcggagtacgacgaggcggtggtgcaccaactctaccgcccgctgctccagtccggccaggcccttggcgcgcgccgctggctcgcctcgctccagcgccagtgccagtacctcgccatcctctgctccaactctctccctgcccgcgaccacgccgcgatcacgccggtggggcggaggagcatgctgaagctggcgcagcggatgacggacaacttctgcgccggtgtgtgtgcgtcggcggcgcagaagtggcggcgcctggacgagtggcgcagcggcgagggaggagacgctgctgggaacggcggatcagcagccgcgggcgagggcgaggagaaggtgcggatgatggcgcggcacagcgtgggggcgcccggggatccccccggcgtggtgctcagcgccaccacgtcggtgcggctgcccgccacgtccccgcagcgcgtgttcgactacctccgcgacgagcagcgccgcggcgagtgggacatcctggccaacggtgaggcaatgcaggagatggaccacatcgccaagggccagcaccacggcaacgccgtctccctcctccgcccaaatgcaactagtggcaaccaaaacaacatgctcatcctgcaagagacctgcaccgacccgtcaggctctctggtggtgtacgccccggtggacgtgcagtccatgcacgtcgtcatgaacggtggcgactccgcctacgtctctctcctcccctctgggttcgccatcctcccggacggccactgccagtcaccaaacactgcacatcagggttcaccaagctgcggcggtagcagcagcagcagcagcacggggtctctagtcacggtggcattccagatcctggtgaacaacctgcccaccgcgaagctcaccgtggagtcggtggagaccgtcagcaacctgctctcctgcaccatccagaagatcaagtctgcgctccaggccagcatcgtcacgccctag

SEQ ID NO: 84 - protein, 863 aa, Zea mays
  ref <308>: DATABASE ACCESSION NUMBER: GRMZM2G116658
MSFGGMFDGAGSGVFSYDATGGGTGMHNPGRLVPAPPLPKPGGFGATGLSLGLQTNMEGAQLGDLGRMGLIGGGGSGSGGDGDSLGRGREDEIDSRSGSDNVDGASGDEIDPDNSNPRRKKKRYHRHTPQQIQELEAVFKECPHPDEKQRMELSKRLNLESRQVKFWFQNRRTQMKTQIERHENALLRQENDKLRAENMTIREAMRNPICANCGGAAVLGEVSLEEQHLRIENARLKDELDRVCALAGKFLGRPISSGSSMSSSLQGCSGLELAVGSNNGYGPGPLGASALQPLPDLLGAGLPGPVGSAAMRLPMGIGALDVALHGAAADGIDRTVLLELALAAMEELMKVAQMDEPLWLRSPDGSGLEALNLDEYHRAFARVFGPSPAGYVTEATREAGVAITSSVDLVDSLMDAARWSEMFPCIVARASTTDIISSGMGGTRSGSIQLMHAELQVLSPLVPIREVVFLRFCKQHAEGLWAVVDVSVDAILRPDGGHHHAQNGGGAGYMGCRLLPTGCIVQDMNNGYSKVTWVVHAEYDEAVVHQLYRPLLQSGQALGARRWLASLQRQCQYLAILCSNSLPARDHAAITPVGRRSMLKLAQRMTDNFCAGVCASAAQKWRRLDEWRSGEGGDAAGNGGSAAAGEGEEKVRMMARHSVGAPGDPPGVVLSATTSVRLPATSPQRVFDYLRDEQRRGEWDILANGEAMQEMDHIAKGQHHGNAVSLLRPNATSGNQNNMLILQETCTDPSGSLVVYAPVDVQSMHVVMNGGDSAYVSLLPSGFAILPDGHCQSPNTAHQGSPSCGGSSSSSSTGSLVTVAFQILVNNLPTAKLTVESVETVSNLLSCTIQKIKSALQASIVTP

SEQ ID NO: 85 - DNA, 2031 bp, Zea mays
  ref <308>: DATABASE ACCESSION NUMBER: GRMZM2G479110
atgaggccggaggagagagatgctgccgtggggagagtcagggaccagttccccgtcggcatgagggtcctcgccgtggacgacgaccccgtgtgcctcaaggtgcttgagaacctcctgcgccgctgccagtatcatgtgacaacgacgaatcaggctgttgtcgccttgagtatgctgaggcaaaacagggacctgtttgatcttgttattagtgatgttcacatgccagacatggatggctttaagcttctagagcttgtggggcttgaaatggacctccctgtcattatgttatcggtgaatggagagacaaaaactgtaatgaaggggataactcatggtgcctgtgactatctcttaaaaccggttcggctggaagagcttaggaatatctggcagcatgttgttaggaggaaattcagtaactgtgatcgtgctaacaatgatggctatgaggagtgcaataggccatcaaatgcagattttgatcttgctcacagccaaattacagctgggccacctgaccaaagtgggaggcccagcaaaaagaggaaggaatatcatagtgaagaggaagatgaaggagaagagagtaatggccaagataacgatgatccttcagctccaaagaaaccaagggttgtttggtcagttgaactgcaccgaaaatttgttgctgctgtcaatcagctaggaattgacaaagccgtgccaaaaaggatacttgagctcatgaatgttgagagactcaccagggaaaatgttgcaagtcacctgcagaagtatagactctaccttaaacggctaagtgctgtggcatcacaacaggctagcattgttgctgctttgggaggcaacgacccctttatgcggatgagtgcatttgaaggactccatggttatcaatcttttgtctcttcagcagctctgccatctttcagtccacagggactgttaaatagaaataatccagcatcatttgcgattcaaggggtgtctgcttccaggccaattcagattgcaaccggcaataccacaatgagtcattccattggcgatccaaatgataaatatcaccttagcttaccaggcactagttgcctacaaggaaatctagcacaaggtttgccaactccagttgggcaggtccagctgccacagaagtggatacacgaagaaaccgacgatctatctactatcctttctgcgagtggccgggctaatagtggtgttcctggcacactccaaagtgtcacgaacagtcacttgctgcagcaaggctttgttgaacgtagacaagacaaagttgttatccagccatcttcatctgcaagttcagatcgtcctgaaggcactgttggagtttcctccagtctgatggattcctgtgcaacccagcagagggttgttccattgtctgccttctctagcagtgcatctccaatgaatggctcgttttgcagcaacggtgtagctgagttgggtgctacatcctctggaggtacaagtattttcccctccaatgacctgaggatagaaagagacagcaaagtgggagctagctcttttggtagtgtgatacttctgtctccagacactgtgccaaaccaaaaatacttgaacttcggcggtggaagcgatttgagatcgaacatggagggagggaacgcaggcaatctgttgaatcccaagctactatggagttgtttgccggcctctcagccgcctaatcttatcggaagtcatcatcccatgagccaaagactgaaccttggcggctcaatggtcagacagacaacagcaagtgcttcggcagctgccccacagacgaggatcgacatgtttatctctggagacgctccgaagagcgcgtcggatttgagcttccctaaggtccacagcgagcttagctctagcagctgcagcttcgacggcctcctcaactccataatcaaagtggagaaggacgatgcttccttcagcgatgacctgggatgcgacttgtactccctgggtgcctgtatatga

SEQ ID NO: 86 - protein, 676 aa, Zea mays
  ref <308>: DATABASE ACCESSION NUMBER: GRMZM2G479110
MRPEERDAAVGRVRDQFPVGMRVLAVDDDPVCLKVLENLLRRCQYHVTTTNQAVVALSMLRQNRDLFDLVISDVHMPDMDGFKLLELVGLEMDLPVIMLSVNGETKTVMKGITHGACDYLLKPVRLEELRNIWQHVVRRKFSNCDRANNDGYEECNRPSNADFDLAHSQITAGPPDQSGRPSKKRKEYHSEEEDEGEESNGQDNDDPSAPKKPRVVWSVELHRKFVAAVNQLGIDKAVPKRILELMNVERLTRENVASHLQKYRLYLKRLSAVASQQASIVAALGGNDPFMRMSAFEGLHGYQSFVSSAALPSFSPQGLLNRNNPASFAIQGVSASRPIQIATGNTTMSHSIGDPNDKYHLSLPGTSCLQGNLAQGLPTPVGQVQLPQKWIHEETDDLSTILSASGRANSGVPGTLQSVTNSHLLQQGFVERRQDKVVIQPSSSASSDRPEGTVGVSSSLMDSCATQQRVVPLSAFSSSASPMNGSFCSNGVAELGATSSGGTSIFPSNDLRIERDSKVGASSFGSVILLSPDTVPNQKYLNFGGGSDLRSNMEGGNAGNLLNPKLLWSCLPASQPPNLIGSHHPMSQRLNLGGSMVRQTTASASAAAPQTRIDMFISGDAPKSASDLSFPKVHSELSSSSCSFDGLLNSIIKVEKDDASFSDDLGCDLYSLGACI

SEQ ID NO: 87 - DNA, 966 bp, Zea mays
  ref <308>: DATABASE ACCESSION NUMBER: GRMZM2G103783
atgtaccgggacacgatcaggcgccatgtggacttggagactctgcggcgtcggctgaacgcgtcggccggctcgcgcgccgacgatgacagccactcctctgcgcacgagctctatcgcgacctgctgctgctctgcacgaacatcgtggtcttcttcccgggtggcacccccgagaactccgcggctgtcgaggcccgcgcgctcgtcaccgggcacgcatcggcggtgctccacaagccgaagcaggagaacgtggctgtggctgcgccggcaccggcaagcgccgacatcgttggttcgctgatcgagaaggggaagccgctgattgtgtgccgcaagcggagctccatcgcgaaggccgcagcgtctgcgagaaaggaggagaacacgatgaagggtgagacggcggaagagacggaggacgagaagaaatccgtggctgcggcgaccaaggacaagacgtggggggtgaggacgaagaagagccgcggtggcaagaactccgcgggtccaggccgaaacctagcggacggtgctgacgggccgaggaagggcgccggtgctggcactgacgggctcgccaagaagcggaacgccgtagacttcctaaagcgcctgaaccagtcgccccccaggaagcgggggtcggggtcccacctgggtacgacgcgaaagcggccggcggcgatggaggagcagacgactaaacgcaagagaggaaccggacggaaggagggcaccggacgcggtggatccaggaggggcggcaaggctgccggggcgaagagaggcgtcgggcggccgcagaaacgaggcctagcaccagccactccgccaccgtccaagaggaccaagacgaacagcagcaggtcggagaagtctttgggaacgggaaagcgtggcgggagaaggcagagtatttttatagatcacgttgttggagatgctctaacactaatataa

SEQ ID NO: 88 - protein, 321 aa, Zea mays
  ref <308>: DATABASE ACCESSION NUMBER: GRMZM2G103783
MYRDTIRRHVDLETLRRRLNASAGSRADDDSHSSAHELYRDLLLLCTNIVVFFPGGTPENSAAVEARALVTGHASAVLHKPKQENVAVAAPAPASADIVGSLIEKGKPLIVCRKRSSIAKAAASARKEENTMKGETAEETEDEKKSVAAATKDKTWGVRTKKSRGGKNSAGPGRNLADGADGPRKGAGAGTDGLAKKRNAVDFLKRLNQSPPRKRGSGSHLGTTRKRPAAMEEQTTKRKRGTGRKEGTGRGGSRRGGKAAGAKRGVGRPQKRGLAPATPPPSKRTKTNSSRSEKSLGTGKRGGRRQSIFIDHVVGDALTLI

SEQ ID NO: 89 - DNA, 2874 bp, Zea mays
  ref <308>: DATABASE ACCESSION NUMBER: GRMZM2G008356
atgtcgtccccggggccacagcaggcgccgccggcgcagcctcccccgccgcaggccgccgcgccccccaccgccgctcccgcaacggtctccgcgacctccatctcggtgcagctgcctcctatccagccgaaaccgccgccgcagccgggtcccacttccggcccgcaaccgccgacgccggcgcagctcttgaatctgggtccgcagccgccgctgtacaggggcccgatctgctggaactcctattgtaaggaccccgaccccaactccttcggccgccgcgggtggaaggtccgctcgggcccaccctactccgtgtacgccgacctctgcgggagatgctattctcagtttgaacaggggatatactgcgaaacgttccattccgaagagggcggctggaggaactgtgaatcctgcgggaggagggtacattgtggctgcatcgtgtccatccacaagtatcagctccgtgacgctggtggggttgactgcgccaagtgtgctcggagcacccgtgctgccatggccccaccaagtcccgtatggacaaatcctattcatagttctcaaaatgtatctgacagaaaagacattactgtaaagagctggagacctcctgctgggcaaatttcaagtcagtggaggcagactaatctgtggagcgtgtccagtatacagtcagacttgcagcagcgtctagcttttgagtttgataggcctagcggcagtgaaaagctacttcctgggcgcacttttattcattcccaggaaaggaaatttgatgacatgcatgacagaccagcaactcctgcgggcatgaaccacattatgagggagagagatcccaatgggcacggtcagaccactaatatggatccagcatactcttataccctctatcacagagatggatcgcatccaaataatcttcatgattctaatcaccattgtggagaaaatgactctttgtcttctaggaaagtggcaatgccagaagcttctacaagtgtggatgctggtttcaagcttgattcacatcatacatctaatttaaaggatgatccaccatccctttcagttggtctggcttctaattttgcaccacagaatggaccgaaagaccatatcagaattgcacctactcagcagcaatcacaaatgacttcctcctcattgcagaaacaattctattctcatgctgtaactggttataatgaatttcaagcacagatgcgcaatggaagacccagaatggattcaaaggctagatcacaattacttccccgctattggcctagaataacagatcaagagctacaacacttatctagcgattcaaattctgttattactcctttgtttgaaaagatgctaagtgctagtgatgctgggcggattggtcgtttagttttgccaaagaagtgtgctgagacatacttccctccaatctcccaacctgaagggctccctttaaaggttcaggatgccagtggtaaagaatggatattccaattccgtttctggccaaataataatagcaggatgtatgtattggagggtgtcacaccttgcattcagtcaatgcagttacaagcaggcgacacagtaacctttagtcgaatagacccagaagggaaattgatcatgggcttcaggaaggcaactaacaattctttcgaacaggagcaagctacaaagcctgccaatggcgccctagcaacttcagaagcaaatggtaaagtttctgccccagattccagtccaaatgctgcagtttcccgtcaaaacaagctcaacacagagaccaaaagttctagtcctgtggaacaagccactgcattgaaaatggacaaggatggattaacacagaaggaagggcctggaactggtagttcttccccaggttctgtcaagagaaaaacaactattcttggtcaaaagaataaaagattacggatggataatgaggaatcaatggagttgaagataacatgggaggaagctcaagaattgcttcgccctcctcctaaggccccatccattgttattgttgatggccatgagtttgaggaatatgaggagccaccggtacttggaaggaagacttattttgtagcagataaatcaggttcgaaccatcaatgggcccaatgtgaagattgttccaaatggaggaaacttccaatagatgctctgttgccctccaaatggacctgctctgacaacaaatgggatccagagaggtgttcttgcgaatctgcacaggaaataagtatagaggagcttgcagaattcattcctataaaacctgccaaaaagcccaaattgaagatagaatctgatgctatcgatgcttcagatgggctggacacgcttgcaaaccttgcgattcttggtgaaggtgaagctctcccttcacagccaacaacaaaacatccccgccatcgtccgggctgctcatgcatcgtctgcatccaaccaccaagcgggaagggtccaaagcacaagcaaacttgcacctgtaacgtttgtatgacggttcgccgccgtttcaggacactcatgcttcgacgcgagaagaaggcgacaaaggatctgtctcgcaagaaagagacgggccaatccagtgagaaggccacacaacaagctgtgtccggacctccaggagccaatgccactgcaaccagatctgcccagaaagcagatggaaacaccgatggacctgaagacatggccgtcgatcacaaggtgacaacatcctctcccgtcaagaaccatattgacctgaacatccaacctgaacgggacgatgagcagtcaccgaaatctggtgcggctggtttgttgagccgagacaatgcaacttag

SEQ ID NO: 90 - protein, 957 aa, Zea mays
  ref <308>: DATABASE ACCESSION NUMBER: GRMZM2G008356
  ref <312>: PUBLICATION DATE: -  -
MSSPGPQQAPPAQPPPPQAAAPPTAAPATVSATSISVQLPPIQPKPPPQPGPTSGPQPPTPAQLLNLGPQPPLYRGPICWNSYCKDPDPNSFGRRGWKVRSGPPYSVYADLCGRCYSQFEQGIYCETFHSEEGGWRNCESCGRRVHCGCIVSIHKYQLRDAGGVDCAKCARSTRAAMAPPSPVWTNPIHSSQNVSDRKDITVKSWRPPAGQISSQWRQTNLWSVSSIQSDLQQRLAFEFDRPSGSEKLLPGRTFIHSQERKFDDMHDRPATPAGMNHIMRERDPNGHGQTTNMDPAYSYTLYHRDGSHPNNLHDSNHHCGENDSLSSRKVAMPEASTSVDAGFKLDSHHTSNLKDDPPSLSVGLASNFAPQNGPKDHIRIAPTQQQSQMTSSSLQKQFYSHAVTGYNEFQAQMRNGRPRMDSKARSQLLPRYWPRITDQELQHLSSDSNSVITPLFEKMLSASDAGRIGRLVLPKKCAETYFPPISQPEGLPLKVQDASGKEWIFQFRFWPNNNSRMYVLEGVTPCIQSMQLQAGDTVTFSRIDPEGKLIMGFRKATNNSFEQEQATKPANGALATSEANGKVSAPDSSPNAAVSRQNKLNTETKSSSPVEQATALKMDKDGLTQKEGPGTGSSSPGSVKRKTTILGQKNKRLRMDNEESMELKITWEEAQELLRPPPKAPSIVIVDGHEFEEYEEPPVLGRKTYFVADKSGSNHQWAQCEDCSKWRKLPIDALLPSKWTCSDNKWDPERCSCESAQEISIEELAEFIPIKPAKKPKLKIESDAIDASDGLDTLANLAILGEGEALPSQPTTKHPRHRPGCSCIVCIQPPSGKGPKHKQTCTCNVCMTVRRRFRTLMLRREKKATKDLSRKKETGQSSEKATQQAVSGPPGANATATRSAQKADGNTDGPEDMAVDHKVTTSSPVKNHIDLNIQPERDDEQSPKSGAAGLLSRDNAT

SEQ ID NO: 91 - DNA, 1287 bp, Zea mays
  ref <308>: DATABASE ACCESSION NUMBER: GRMZM2G405368
atgacgccaagtgtcacgccctggattcctctggcacccaccctcctattagtactctgcactggacttgcagcgctgtggatccatcactgcaacttcatggattataattttgacaccagcgtcctcgacgaggacgtcgccgggagaggaggcagggaagggagctgcccgccagcatgggccagggcgtgcgacgggtgccgcgcagcccccagcgtggtgtactgccatgcggacaccgcgtacctgtgcgcgtcatgcaactcgcgggtgcatgccgccaatcgcgtggcctcgcgccatgagcgcgtgcgcgtctgcgaggcctgcgagtgcgcccccgcggtgctcgcgtgccgcgccgacgcggcggcgctctgcgctgcctgcgacgcgcaggtccactccgccaacccgcttgcggggaggcaccagcgcgtgcccgtcctgccgctcccggccgccgccgtcccggctgcctctgtgctcgccgaggcagctgccaccgccgcggccgttgctggtgacaaggacgaggaggtcgactcctggctgctgctcaccaaggacccagacgacgacgacaagaaccacaactgcagtagcaacaacaacaacatcagcagcaacaccagcacgttctacgcagacgttgacgagtacttcgatctggtcgggtacagttcctactgtgacaaccacatcaatagcaacacgaaacagtacgggatgcaagagcagcagctcctgctgcacaaggagtttggagacaaggagggaagcgagtacgtggtgccttcacaggtcgggcagcagcagagtggctatcacagagttattgggacggagcaggctgcctccatgactcccggggtcagtgcttacacagattccatcagcaacagcatctctttctcatcgtcaatggaggtgggtatagtaccagacaacatggcaacgacagacatgccaagctccggcatcctgctgacgcctgctggggccatcagcctgttctcgtcgggtcctccgctccagatgccgcttcacttggcctccatggacagggaggccagggtgctgaggtacagggagaagaagaagagcaggaagtttgagaagaccatacggtatgcaacgaggaagacgtacgcagaagcacggccgaggatcaagggacgcttcgcgaaaagatcgtctgatatggatgtcgaagtggatcagatgttctcagctgcggctctgtcgtctgatggtagctatggtaccgttccatggttctga

SEQ ID NO: 92 - protein, 428 aa, Zea mays
  ref <308>: DATABASE ACCESSION NUMBER: GRMZM2G405368
MTPSVTPWIPLAPTLLLVLCTGLAALWIHHCNFMDYNFDTSVLDEDVAGRGGREGSCPPAWARACDGCRAAPSVVYCHADTAYLCASCNSRVHAANRVASRHERVRVCEACECAPAVLACRADAAALCAACDAQVHSANPLAGRHQRVPVLPLPAAAVPAASVLAEAAATAAAVAGDKDEEVDSWLLLTKDPDDDDKNHNCSSNNNNISSNTSTFYADVDEYFDLVGYSSYCDNHINSNTKQYGMQEQQLLLHKEFGDKEGSEYVVPSQVGQQQSGYHRVIGTEQAASMTPGVSAYTDSISNSISFSSSMEVGIVPDNMATTDMPSSGILLTPAGAISLFSSGPPLQMPLHLASMDREARVLRYREKKKSRKFEKTIRYATRKTYAEARPRIKGRFAKRSSDMDVEVDQMFSAAALSSDGSYGTVPWF

SEQ ID NO: 93 - DNA, 1359 bp, Zea mays
  ref <308>: DATABASE ACCESSION NUMBER: GRMZM2G106548
atgctccaaggggtgctgtcccgcgcgcccgccaccgacgctgcggcagcaatgaaggccaagcgggcgggcgcgtcccccggcgaagaggaggaaggggacggccgttctgcgcgggggaagcgacagcagctgctcgggcttggccccgccaccgctttggcgtcggcggcggcggcggaggaagggccggagacgcgaggcctgcggctgctcagcctgctgctgcggtgcgcggaggcggtggccatggaccagctgacggaggcgcgggagctgctccccgagatcgcggagctggcgtcgccgttcgggtcgtccccggagcgcgtggcggcctacttcggtgacgcgctgtgcgcgcgcgtgctcagctcgtacctgggcgcctactcgccgctcgcgctccgcccgctggcggccgcgcagagccgccgcgtggcggtggcgttccaggcgtacaacgcgctgtcgccgctcgtcaagttctcgcacttcacggccaaccaggccatcctgcaggcgctcgacggcgaggactgcctccacgtgatcgacctggacatcatgcagggcctgcagtggccggggctcttccacatcctcgcgtcccgcccgcgcaagccgcggtcgctccggatcaccgggctcggcgcgtcgctcgacgtcctcgaggccactggccgccgcctcgccgacttcgcggcctcgctcggcctcccgttcgagttccgacccatcgaggggaagatcgggcacgtcgccgacgccgcggcgctcctcggctcgcgccagcggcggcgggatgacgaggccaccgtggtgcactggatgcaccactgcctctatgacgtgacggggtcggacgtgggcacggtgcggctgctccggagcctgcgcccgaagctgatcaccatcgtggaacaggacctgggccacagcggcgatttcctgggccggttcgtggaggcgctgcactactactcggcgctgttcgacgcgctgggagacggcgccggcgcggccgaggaggagtccgccgagcggtacgcggttgagcgacagctcctgggcgcggagatacgcaacatcgtggccgtaggggggcccaagcggacaggggaggtgcgcgtggagcggtggagccacgagctgcggcacgccgggttccggccagtgtccctggccgggagccctgccgcgcaggccaggctgctcctcggcatgtatccgtggaaggggtacacgctggtggaggaggacgcgtgccttaagctgggctggaaggacctctccctgctcaccgcgtcggcgtgggagccggcggacgacgctgccgcttctgcgcccaccggttaa

SEQ ID NO: 94 - protein, 452 aa, Zea mays
  ref <308>: DATABASE ACCESSION NUMBER: GRMZM2G106548
MLQGVLSRAPATDAAAAMKAKRAGASPGEEEEGDGRSARGKRQQLLGLGPATALASAAAAEEGPETRGLRLLSLLLRCAEAVAMDQLTEARELLPEIAELASPFGSSPERVAAYFGDALCARVLSSYLGAYSPLALRPLAAAQSRRVAVAFQAYNALSPLVKFSHFTANQAILQALDGEDCLHVIDLDIMQGLQWPGLFHILASRPRKPRSLRITGLGASLDVLEATGRRLADFAASLGLPFEFRPIEGKIGHVADAAALLGSRQRRRDDEATVVHWMHHCLYDVTGSDVGTVRLLRSLRPKLITIVEQDLGHSGDFLGRFVEALHYYSALFDALGDGAGAAEEESAERYAVERQLLGAEIRNIVAVGGPKRTGEVRVERWSHELRHAGFRPVSLAGSPAAQARLLLGMYPWKGYTLVEEDACLKLGWKDLSLLTASAWEPADDAAASAPTG

SEQ ID NO: 95 - DNA, 894 bp, Zea mays
  ref <308>: DATABASE ACCESSION NUMBER: GRMZM2G149958
atggccgtggacgaggcgagcagcagtggcggtggggaggaggggtgcgggtcgtggacccgcgagcaggagaaggcgttcgagaacgcggtggcgacgatgggcggggaggaggacggggacgcgaggtgggagaagctagcggaggccgtcgaggggaagacgccggaggaggtcaggcggcactacgagctgctggtggaggacgtcgacggcatcgagtcgggccgcgtcccgcttccggcgtacgcggctgacggcgctgccgaggaagggggcggtggcgggaagaagggaagtggcggaggagggacccatggggacaaggggtcggcgaagtccgccgagcaggagcgtaggaagggcatcgcctggacagaggacgagcacagattgttcctccttggacttgaaaagtatggcaaaggtgactggcggagcatctcgcggaactttgtgatctcaaggacgccgactcaagtagctagtcatgcacagaagtactttatccgtctgaactcaatgaacagagaaaggcggcgatcaagtatacatgacatcaccagtgtgaacaatggagatccatcaactgcacagggtccaatcacaggccaaacaaatggtcaggctgcaaatcctggaaaaccatctaagcaatccccgcagccagcgaatacacctccaggcgtcgatgcttatggcacaacaattggacagccagttggtggcccccttgtctcagctgttggaactcccgttacactacctgtttccgctccacctcatctggcctatggcatgcgtgccccggttccaggagccgtagtacctggtgctccagtaaacattgctccgatgccctatccaatgccacccccaccatctcatgggtga

SEQ ID NO: 96 - protein, 297 aa, Zea mays
  ref <308>: DATABASE ACCESSION NUMBER: GRMZM2G149958
MAVDEASSSGGGEEGCGSWTREQEKAFENAVATMGGEEDGDARWEKLAEAVEGKTPEEVRRHYELLVEDVDGIESGRVPLPAYAADGAAEEGGGGGKKGSGGGGTHGDKGSAKSAEQERRKGIAWTEDEHRLFLLGLEKYGKGDWRSISRNFVISRTPTQVASHAQKYFIRLNSMNRERRRSSIHDITSVNNGDPSTAQGPITGQTNGQAANPGKPSKQSPQPANTPPGVDAYGTTIGQPVGGPLVSAVGTPVTLPVSAPPHLAYGMRAPVPGAVVPGAPVNIAPMPYPMPPPPSHG

SEQ ID NO: 97 - DNA, 1089 bp, Zea mays
  ref <308>: DATABASE ACCESSION NUMBER: GRMZM2G041818
atggcctcggaccaacaggccctcccggtcccggtcccggtccccgtcccgcccaaccctaacccgaccgcaccagccgacctgaccccgccctcggcgtccgccgcgcgcaagctccccatcaagcggcgctccccgcggccgtcgtcctcgcccccgtcctcttcttccccggcctcctccgacccgctccgcgcgcccggcggcggcggcggatccgaccagcagcagccgcccttcaagttccagcgcatctggtccgagtccgacgagctccgcttcctgcagggcctcctcggctgcggcacgcagggcctcgtcttcccgcgcgacctcaacgtcttctacgaccgcttctccgagtccatgccccagccctacacccgcgcccagctctcggagaagctccgccgcctcaagaacaagttccgcagcatgtccgcgcgcgtcgcgggaggcatagacccggcccgcctcgcgccgcacgaccgcgacgtgctccacctctgctccaggctgtgggaccccgccaacgccgccacctcgcccttcgcggccagcgccggaacgtcggggaacaagcgccgccgctccaacccgcgtggcacgcccccagacgcgtctggggatagcaactcccatgactacaatgggattagctcctctgctcccggtttgtttccggatggttccaacggcgaggatacgttttaccttgagcaagaaagcgggcagctgggcaatcatgaaggcgctgctcttgtagcagatagcaaattcgatgttgtggtgcaggagcagcctgaggccgtggttactctcccgaatgggaacaacggaattggcagtgagatgagtgcggagtgtaaaacggtggtgccgtgcagcaacgagcaccgaatggcaaatgctgtcctagatgtgtttgaggaatgcctgagggaggcaaagagtaacgggattatcaatggtggcaatgtggagagcgagctctccaagcggtggagagcacagaggatggatgagcttgatgtcttgagccggaggctgaggttgctcgtcgagtatgctgcagcggctgggcattga

SEQ ID NO: 98 - protein, 362 aa, Zea mays
  ref <308>: DATABASE ACCESSION NUMBER: GRMZM2G041818
MASDQQALPVPVPVPVPPNPNPTAPADLTPPSASAARKLPIKRRSPRPSSSPPSSSSPASSDPLRAPGGGGGSDQQQPPFKFQRIWSESDELRFLQGLLGCGTQGLVFPRDLNVFYDRFSESMPQPYTRAQLSEKLRRLKNKFRSMSARVAGGIDPARLAPHDRDVLHLCSRLWDPANAATSPFAASAGTSGNKRRRSNPRGTPPDASGDSNSHDYNGISSSAPGLFPDGSNGEDTFYLEQESGQLGNHEGAALVADSKFDVVVQEQPEAVVTLPNGNNGIGSEMSAECKTVVPCSNEHRMANAVLDVFEECLREAKSNGIINGGNVESELSKRWRAQRMDELDVLSRRLRLLVEYAAAAGH

SEQ ID NO: 99 - DNA, 2127 bp, Zea mays
  ref <308>: DATABASE ACCESSION NUMBER: GRMZM2G437460
atggcgggcatcgacctcaacaccgtggaggaggaggacgaggaggaggcggaggcgctgcctttgcccggacccggtggccgtggcgccgtgtgcctggagctgtggcacgcgtgcgcgggccccgtcccgccgctgccgcggaagggcagcgccgtcgtgtacctgccgcagggccacctcgagcacatcggcggcgacgcggcgcgaggagcagcagcttcggcggtgccgccgcacgtgctctgccgcgtcgtcgacgtcaccctccacgcggacggcgcgacagacgaggtgtacgcgcgggtgtcgctgctgcccgaggacgaggacgcggagaagcgggcgcaggcgcaggcgcgggtccgggaggacgaggaccgccgcgacggcgaggacggcggcgccatgaggccgctcgcacggacgccgcacatgttctgcaagacgctcacggcatccgataccagcacgcacggcggtttctcagtgccgcgccgcgccgccgaggactgcttcccgccgctggactacagccagcagaggccgtctcaggagctcgtggccaaggatctacacggcacggagtggaagttccggcatatctatcgaggtcagccacgaaggcatctcttaaccactggatggagtgcatttgttaataggaagaagctcatttctggagatgcagttctcttccttcgaggcgaagatggagtgcttcgactgggagtgcgccgagcagcccagctaaaaattgtaactcctattcctgcacctcataaccagtgctcaagtaatagcaatcttggaaacgttgcacaagctgtggccacgaagactgttttccacatctactacaatcccaggttaactcaatctgaattcattgtaccctattggaagttcacaagaagcttcaatcaaccaatttctgttggaatgaggtgcagaatgcgatatgaaagtgacgatgcttctgaaagaaggtgcactggtataataattggaagcagagaagctgatcctatatggtatggttcgaaatggaaatgcttggtggttagatgggatgatggtatagagtgccgttggcccaatagggtatctccttgggagattgagctcacaggatctgtttcaggatctcaaatgtgcgctcccagttcaaaacgtctgaaaccatgcctcccccaagttaatccggagattgtgcttccaaatggaagtgtttcttcagattttgcgggatctgccagattccacaaggtcttgcaaggtcaagaattgttgggtttcaaaacccatgatggtcctgctatttctgcttctcaggcaactgaagcaagaaatttgcagtacagtgatgaacggagtaacaataacttagggatcccaagacttggtgttaggtctccaactggaatccctgggtttccctaccattgctcaggctttggggaatctcaaagattccaaaaggtcttgcaaggtcaagaagtgtttcatcctttccgaggaggatgtttggctgatggccatataagaactgctggcatgtatcaacctgacggtaggcatgtatctggtgcagcttataaatggtctgcaccacaagggtatgatttcccacagccagcaaaaccggtttttctgttgcaagaatcatccccatcatctgtgatgatgtttccacaaactagatctaagataactcacttggaatatgagtactcaagacatgaggatggtagacttgataggactgttcctactcaagacatgggaagaagcaatcaaacattatctctttggcctcatcttgtttcaggcgaagcaatagaagaatgtactggaactgtgaatatgcactcccccgtcagtggtgcagagcatgaatcaaacaatgagagtacagttgaaaatggctgcaaaatctttggtatctcattggctgaaaagatccgatcatgcgatgaagcagactcttgtagtgcaaaatgtaattctcggctccagcctttgaagtcacaaatgccaaaatcgctaggcagctgttgggccactgttcacgagcaaaggcctgttgttggcagggtggttgacgtctcggcgacagatatgtga

SEQ ID NO: 100 - protein, 708 aa, Zea mays
  ref <308>: DATABASE ACCESSION NUMBER: GRMZM2G437460
MAGIDLNTVEEEDEEEAEALPLPGPGGRGAVCLELWHACAGPVPPLPRKGSAVVYLPQGHLEHIGGDAARGAAASAVPPHVLCRVVDVTLHADGATDEVYARVSLLPEDEDAEKRAQAQARVREDEDRRDGEDGGAMRPLARTPHMFCKTLTASDTSTHGGFSVPRRAAEDCFPPLDYSQQRPSQELVAKDLHGTEWKFRHIYRGQPRRHLLTTGWSAFVNRKKLISGDAVLFLRGEDGVLRLGVRRAAQLKIVTPIPAPHNQCSSNSNLGNVAQAVATKTVFHIYYNPRLTQSEFIVPYWKFTRSFNQPISVGMRCRMRYESDDASERRCTGIIIGSREADPIWYGSKWKCLVVRWDDGIECRWPNRVSPWEIELTGSVSGSQMCAPSSKRLKPCLPQVNPEIVLPNGSVSSDFAGSARFHKVLQGQELLGFKTHDGPAISASQATEARNLQYSDERSNNNLGIPRLGVRSPTGIPGFPYHCSGFGESQRFQKVLQGQEVFHPFRGGCLADGHIRTAGMYQPDGRHVSGAAYKWSAPQGYDFPQPAKPVFLLQESSPSSVMMFPQTRSKITHLEYEYSRHEDGRLDRTVPTQDMGRSNQTLSLWPHLVSGEAIEECTGTVNMHSPVSGAEHESNNESTVENGCKIFGISLAEKIRSCDEADSCSAKCNSRLQPLKSQMPKSLGSCWATVHEQRPVVGRVVDVSATDM

SEQ ID NO: 101 - DNA, 1197 bp, Zea mays
  ref <308>: DATABASE ACCESSION NUMBER: GRMZM2G128206
gtgcctccatcttccgattcccatcccccgtcgtcgcttgtttggtgctgtcttttcctttccgccgcggcaaaagtgaggagcgcgcgggcgagttgggggagacgaacccgtcataactccctcgcttaatcgcgtctcgtgctcctgcctcctgcgtatataaacgcggcaatcgggacgcccggggaggcgttcgttctccttctccatcccacgcgcgcgcaggccaaggccggatcggcggcctctcagatctcgccggccgccgtgagacagagaccgaagggggggttgaccggtgctcgggaggaagatgtttagcgggacgcagcagaagtgcaaggtgtgcaccaagacggtgtacccgatggaccagctctccaccgacggcgtcgtcttccaccgctcctgcttcaagtgccagcactgcaagtctaccctctcactgagcaactattcctcgttcgaaggagtgccgtactgcaagacccatttcgagcagctgttcaaggagaccgggagttacaacaagagcttccaatcacagtcacctgcaaagattactccggaaaagttggcccctgagctgaccagatcaccaagcaaagctgcaaggatgttttcaggaacacaagacaagtgtgcgacttgtggtaaaactgcgtatcctcttgagaaggtaacagtcgaagagaagtcctaccataagtcatgcttcaaatgctcccacgggggctgcgcgattacaccttccaactatgcagccttggagggcatcctctactgcaaacaccatttctcccaacttttcaaggagaagggaagctacaaccacttgatcaagtgcgcgtccgtcaagcgcgctgctgaagcacagccagaacaaccggcctctgattcctcctcctgaccacgccatttaaacagtgggggtttggaggcgagagagttgggaagcctcctgtttctacttaaaaccgcgtgatgtatgttattccatctatgccccgaggatactagactactactctattttggtatcctctgctgtgctagctggatcatatcagcgaaccatggaattgctgtcattttcaatgaaactgttgtgcatcaagtagtgaaatcttcactgaaatcgggtatcttgcctttattgatcaatatattatctatgttgttttgttgtcttta

SEQ ID NO: 102 - protein, 198 aa, Zea mays
  ref <308>: DATABASE ACCESSION NUMBER: GRMZM2G128206
MFSGTQQKCKVCTKTVYPMDQLSTDGVVFHRSCFKCQHCKSTLSLSNYSSFEGVPYCKTHFEQLFKETGSYNKSFQSQSPAKITPEKLAPELTRSPSKAARMFSGTQDKCATCGKTAYPLEKVTVEEKSYHKSCFKCSHGGCAITPSNYAALEGILYCKHHFSQLFKEKGSYNHLIKCASVKRAAEAQPEQPASDSSS

SEQ ID NO: 103 - DNA, 702 bp, Zea mays
  ref <308>: DATABASE ACCESSION NUMBER: GRMZM2G319187
atgacggtgctggacgccgagtcgcggttccatgtcctggcggtggacgacagcatcatcgacaggaagctcatcgagatgctgctcaagagctcgtcttaccaagtgaccacggtggattccgggaacaaggcgctggagctgctggggctgagggacaacggcgcggaggacgcgtcgccgccgtcatcgtcctcatcatcttcgtcgtcgtcctcccctgaccatcaggagatcgacgtgagtctcatcatcactgactactgcatgcccggcatgacaggatacgatctgctcaagcgagtgaaggggtcctcatcgctcaaggacattccggtggtgatcatgtcgtctgagaacgtgcctgcccggatcagcaggtgcttgcaggatggcgcggaggagttcttcctgaagcccgtgaagccggccgacatgaagaagctcaagtcacacctgctgaagcggaagcagcccaaccagaagaacaagcctcaggcgcaggcggtggagtctcctgagcagcagctggacccgcatccgcagccggtgcacgagccggaggaagccgcggcagatcgcaacggcgtcaacaagaggaaggcagcggccatggaggaggggctgaccgtggtggtgacggcgccggagagcaccaagccgaggaggctgtctacgagcagcctgactgtggagacctga

SEQ ID NO: 104 - protein, 233 aa, Zea mays
  ref <308>: DATABASE ACCESSION NUMBER: GRMZM2G319187
MTVLDAESRFHVLAVDDSIIDRKLIEMLLKSSSYQVTTVDSGNKALELLGLRDNGAEDASPPSSSSSSSSSSSPDHQEIDVSLIITDYCMPGMTGYDLLKRVKGSSSLKDIPVVIMSSENVPARISRCLQDGAEEFFLKPVKPADMKKLKSHLLKRKQPNQKNKPQAQAVESPEQQLDPHPQPVHEPEEAAADRNGVNKRKAAAMEEGLTVVVTAPESTKPRRLSTSSLTVET

SEQ ID NO: 105 - DNA, 903 bp, Zea mays
  ref <308>: DATABASE ACCESSION NUMBER: GRMZM2G025812
atggacatcgacctcttccccgacatcgaccttgacgccctcctcgcctccttctccggcgaccccgccgccgtctccggcctcatcatcccgtccccgcctccgccggcgccggcgacggcgcacgatgcggaggcggggtcgccggagtcggtgacctcccggacgaacccgctcggggaggtggcgctctcggagatcgagaggctcctgatgcaggagggggaggcggaactgggcggggaggtcgatgggatcagcgtggaccagttcttcgacgcgctgtacgacggcgaggaggcgaaaggtgagcgggaggcgggggcaagcgcggatgtggactccggcagggacgatgtgctggaagtcgtgacgccagaggcggggacggtggaggtggatggcgatgatcccatcagcaagaagaagatgaggcaaatgaggaacagagattccgccatgaaatccagggagaggaagaagtcgtacataaaggacttggagacaaagagcaagcacttggaggcagagtgccgtcgcctcagctacgcacttcagtgctacgcagctgaaaacatggcactgcgccagagcttgctgaaggataggcctcttggtgctcccacagccacgcaggagtctgccgtactcacggaaaccctgccgctggtttccctgctttggctggtgagcatcgtctgcctgttcctgatgcccgttctgcccaaccgaagcccagctgctccaagcagcggcggaagagacctcgtgatggcagccggaaagacaagcagtgagaccccagagatactggaactcatcctccatggaaggcgttgcaagagcacgagggcgaagattaagctatgtattttaccatttcatgcaggagctgcttgctag

SEQ ID NO: 106 - protein, 300 aa, Zea mays
  ref <308>: DATABASE ACCESSION NUMBER: GRMZM2G025812
MDIDLFPDIDLDALLASFSGDPAAVSGLIIPSPPPPAPATAHDAEAGSPESVTSRTNPLGEVALSEIERLLMQEGEAELGGEVDGISVDQFFDALYDGEEAKGEREAGASADVDSGRDDVLEVVTPEAGTVEVDGDDPISKKKMRQMRNRDSAMKSRERKKSYIKDLETKSKHLEAECRRLSYALQCYAAENMALRQSLLKDRPLGAPTATQESAVLTETLPLVSLLWLVSIVCLFLMPVLPNRSPAAPSSGGRDLVMAAGKTSSETPEILELILHGRRCKSTRAKIKLCILPFHAGAAC

SEQ ID NO: 107 - DNA, 1749 bp, Zea mays
  ref <308>: DATABASE ACCESSION NUMBER: GRMZM2G040115
atgaatgagctctgcgacctcgaggtgcacatcaatggccatcacacgcttcatctccaccagagcgtcatgtgcgccttctcggggaggctgaggacactggtgaagcaggagaagaagaagaagaagggcggcggcaggaaggaagccgtgtccatcaatctcgccggcggcttcccgggcggcgccgacggcttcgagctcgtggccaggttctgctacaacgacggccgcgtcctgctctgcacctccaacctcccgctcctgcactgcgccgccgtgtccctggagatgaccgaggaggtgtgcgcctgcaacctgctggcgcaggcggaggccttcgtcaacgggctctactactggacctggggcgacgtgctggccgcggtccggagctgcgagcccttcgccgcggcggccgacgcctcgggactcctggacaggctcatctccgcgctcttctccaagatcaccggcgccaccccgggcccgggcccggggacgccgaaccgctcctcgtcgtcgtgctcgtcgtcgcccgacaccgcgggcttgcgccggtcgtcgtcgtccgccaacaagacgccggactcgatgcggccctgcgccggcagggagtggtggttcgacgacatgacgtcgctgtccccgccgaccgtcgagaaggtgatgcgcgtgctcggctgctacggcgtcgagaacaagaacctgatcctcacgcggttcctgctgcactacctccgcgccgccacgcgcaggccgccggcgcttgagcgggagggcgccgcgctcgccggcctcgcggaaacggccgtccacggcgtggcgctcgtcgggggcacggcgttctcgtgccggggcctcttctgggtgctccggatcgtgtcggcggtggggctgagcagggagtgccgccacaagctggagcggctcatggggctgatgctggaccaggccacgctcgacgacctcctcgtctccggcgacgacggcggcggcgtgtacgacgtcaacctggtcatgaggctggtcagggtgttcgtggcctccgaagaggaggcagacgcgccgtcggagaggatgcggaaggtggggcgcctggtcgacaagtacctcggcgaaatctcgccggaccaggggctgaaggtgtccaagttcctcgccgtcgccgagagcctgccggactcggccagggactgctacgacggcgtgtaccgggcgctggacatctacctcgagtcgcacccagcactgtccctagaggagcgcacgacgctgtgccggtgcctcaactacgagaagctgacgctggaggcgtgcaaggacctggccaagaaccggcggatcccgccgggcgtggcggtgcaggcgctggcgtcgcagcagtgcaagctccacatcagcgagccgggccccggcgggagcgcgacggcggcagcggggaaggagcgccggcccgacccgtcctcctgctcccagtcccagacgccgaggaggagggtcgcccgccgcgccacccgcagcgtggacctcggcagaaggagcggcggcgacgacgacgagaaggagctgctgcggctgaacctgcagagaatgcagagccgggtggtggagctggagcgggcgtgcaaggagatgaagggccagatgtccagaatggccaagggcaagtccttgtccttgtccttcggctccggcgccgcctcctgccaccagaccggcggcaggggcttgcctaggctctgctga

SEQ ID NO: 108 - protein, 582 aa, Zea mays
  ref <308>: DATABASE ACCESSION NUMBER: GRMZM2G040115
MNELCDLEVHINGHHTLHLHQSVMCAFSGRLRTLVKQEKKKKKGGGRKEAVSINLAGGFPGGADGFELVARFCYNDGRVLLCTSNLPLLHCAAVSLEMTEEVCACNLLAQAEAFVNGLYYWTWGDVLAAVRSCEPFAAAADASGLLDRLISALFSKITGATPGPGPGTPNRSSSSCSSSPDTAGLRRSSSSANKTPDSMRPCAGREWWFDDMTSLSPPTVEKVMRVLGCYGVENKNLILTRFLLHYLRAATRRPPALEREGAALAGLAETAVHGVALVGGTAFSCRGLFWVLRIVSAVGLSRECRHKLERLMGLMLDQATLDDLLVSGDDGGGVYDVNLVMRLVRVFVASEEEADAPSERMRKVGRLVDKYLGEISPDQGLKVSKFLAVAESLPDSARDCYDGVYRALDIYLESHPALSLEERTTLCRCLNYEKLTLEACKDLAKNRRIPPGVAVQALASQQCKLHISEPGPGGSATAAAGKERRPDPSSCSQSQTPRRRVARRATRSVDLGRRSGGDDDEKELLRLNLQRMQSRVVELERACKEMKGQMSRMAKGKSLSLSFGSGAASCHQTGGRGLPRLC

SEQ ID NO: 109 - DNA, 897 bp, Zea mays
  ref <308>: DATABASE ACCESSION NUMBER: GRMZM2G120151
atgataagcggcaacctcaacaatgaagagctggggggcggcgggtgcaccaaggccgaggggccgggcgcggccggcggcgccggcgccgtcgtcgcaaagagtcccgtgctgtcgagctcccggcactggccgccgtcgacggagtcgaggatcgtgcgcgtgtcgcgggtcttcggcggcaaggaccggcacagcaaggtgaggacggtcaaggggctgcgcgaccggcgcgtgcggctgtccgtgccgacggcgatccagctctacgacctccaggaccggctgggcctcagccagccgagcaaggtggtggactggctgctcgacgccgcgcaggacgagatcgacaagctgcctccgctccagttcccgccgcaagggcaggacctcgtcgcccatctcccgccgtccatggtggcgcccttcgccaacgttgcagccgaccgggccgccgccgccgctgccgccgcgaacgcgtcggccgcgatggccgaaggcggcaaacgccactgccacggaggcatcaaagggctcatgggcatgggcctcaacaattctatcggcctcgccaacgccaccatgccgctggctcacggcttgtactacacgcccggtgagtcttggaccaatggaggcaatgccgccgtccatgatcatcaggtgagccacggcggcacctcgcctcagacggtggctcaccactcgccgttctcgtctctgctgtctcttgctgctccggggccccagctcgtcttctactcgccggaaggcggcggcttcgccatgaaagaagccaccgatcatcagttcgctgtagatagcctcgatcactcgcaaggccagctctcactgagctcagctagaagcttccttcaccccggcaaccagggatga

SEQ ID NO: 110 - protein, 298 aa, Zea mays
  ref <308>: DATABASE ACCESSION NUMBER: GRMZM2G120151
MISGNLNNEELGGGGCTKAEGPGAAGGAGAVVAKSPVLSSSRHWPPSTESRIVRVSRVFGGKDRHSKVRTVKGLRDRRVRLSVPTAIQLYDLQDRLGLSQPSKVVDWLLDAAQDEIDKLPPLQFPPQGQDLVAHLPPSMVAPFANVAADRAAAAAAAANASAAMAEGGKRHCHGGIKGLMGMGLNNSIGLANATMPLAHGLYYTPGESWTNGGNAAVHDHQVSHGGTSPQTVAHHSPFSSLLSLAAPGPQLVFYSPEGGGFAMKEATDHQFAVDSLDHSQGQLSLSSARSFLHPGNQG

SEQ ID NO: 111 - DNA, 1497 bp, Zea mays
  ref <308>: DATABASE ACCESSION NUMBER: GRMZM2G155954
atgggtaagagaggaaagtggtttagtgcggtgaagaaagtcttcagctcctccgatccagatggaaaggaagccaaggcccagaaggcagacaaatcgaaatccaagaggagatggccatttggaaagtccaagcactcggagccttccatatcgacggtgccaggcactgctccagcagtagctccgttgccatcaccaccagcaactcagccccactctctggagatcaaagatgtcaatccagttgaaacagacagtgagcagaacaagcatgcctactccgttgcgcttgcgtctgctgtcgctgctgaagctgcagcagttgctgcccaggctgctgcggaagttgtccgcctcacagcagttaccacggctgcaccaaagatgcctgttagttcgagggaagaacttgccgccaccaagattcagactgccttcaggggttatctggcaaggagagcattgcgtgcactaagagggctagttagattgaagtcgcttgttgatggaaatgctgtcaaacgccaaaccgctcacaccttgcaatgcacacaagcaatgacaagagttcaaactcaaatctactctagaagggtgaagttggaggaggagaaacaggctcttcaaagacaactccaattgaaacatcaaagggaacttgagaaaatgaagattgatgaagattgggatcacagccatcaatccaaagagcaaattgaggccaacctaatgatgaaacaggaagctgcactgaggcgagagagagcacttgcatatgcattttctcaccagtggaggaattctggtcgaactataacccctacttttacggaacctgggaaccccaactggggctggagctggatggagcgctggatgacagcaagaccatgggagagtcggttggcggcggcatcggacaaggaccctaaagaacgtgctgtgacaaagaatgcgagcaccagtgctgttcgagtacctgtatcccgtgccatctcgattcagagaccagcaacaccaaacaagtcgagccgcccaccaagccggcagtcactttcaaccccgccatcgaagaccccgtcagcctcaggaaaggccaggccggcaagtccaaggaacagttggctgtacaaggaggatgacctgaggagcatcacgagcatccgctccgagcgcccaaggaggcagagcacgggtggaggctcggtccgggacgataccagcctgaccagcacaccacctctccccagctacatgcagtcgaccgagtctgcacgggccaagtctcggtaccgcagtctactactgactgagaagcttgaggttcctgagagagcgcctctggcccactccgttgtcaagaagcgcctgtcgttccccgtcgtcgagaagccaagcgttgtgccgacagagaagcccagggaaagagtgaggcgccattccgaccctccgaaggtcgatcctgcgacgctcaaggatgcccctgctgcctga

SEQ ID NO: 112 - protein, 498 aa, Zea mays
  ref <308>: DATABASE ACCESSION NUMBER: GRMZM2G155954
MGKRGKWFSAVKKVFSSSDPDGKEAKAQKADKSKSKRRWPFGKSKHSEPSISTVPGTAPAVAPLPSPPATQPHSLEIKDVNPVETDSEQNKHAYSVALASAVAAEAAAVAAQAAAEVVRLTAVTTAAPKMPVSSREELAATKIQTAFRGYLARRALRALRGLVRLKSLVDGNAVKRQTAHTLQCTQAMTRVQTQIYSRRVKLEEEKQALQRQLQLKHQRELEKMKIDEDWDHSHQSKEQIEANLMMKQEAALRRERALAYAFSHQWRNSGRTITPTFTEPGNPNWGWSWMERWMTARPWESRLAAASDKDPKERAVTKNASTSAVRVPVSRAISIQRPATPNKSSRPPSRQSLSTPPSKTPSASGKARPASPRNSWLYKEDDLRSITSIRSERPRRQSTGGGSVRDDTSLTSTPPLPSYMQSTESARAKSRYRSLLLTEKLEVPERAPLAHSVVKKRLSFPVVEKPSVVPTEKPRERVRRHSDPPKVDPATLKDAPAA

SEQ ID NO: 113 - DNA, 1974 bp, Zea mays
  ref <308>: DATABASE ACCESSION NUMBER: GRMZM2G113950
atgagcctgtcaccgctcgactcctcctccccgccggccgcggctgcggctgctgctacggaggtgcccctcgccccgggcttccgcttccaccccaccgacgaggagctcgtctcctactacctccgccgccgcgtcctcggccgccgcctccgcgtcgacgccatcgccgagatcgacctctaccgcctcgagccctgggacctcccctccctctcccgcatccgcagccgcgacgcccagtggtacttcttcgcccgtctcgaccgcaaggtcgccggcgctggcgccgggggccggggcggtcccggcaacaggaccaaccgcgctacgccgagggggtactggaagaccacgggcaaggaccgcgaggtgcaccaccgcggcaagcccgtcgggatgaagaagacgctcgtcttccacgccgggagggcgcctaagggcgagaggaccaactgggtcatgcacgagtaccgcctcctcgatgcagacggacctcaggatctgcatgtggtttgtagaatcttccagaagcatgggtctggaccacagaacggtgcgcagtatggtgcaccatacatggaagaggaatgggaagaggatgatgatgctattgagaatggttctacccacgatgcatctggtcaaattgctgcaaccacctgtgctgtagatgaggagtcaaatgaggacgatgagaatgcatattgtgaaacaaacagacctgctcgagtagaaccatctcatctgccttcggtccatgaaatgctcaatccaccagagatggctcctctccaaggtcaagattctaaagagacaagcgatggaagttgttctgatgttgctatttctctggaagagattttgcaggaacctttgtcaaatattagtgtggagaatatgcatagacttgaagggcagaatgccactgatgataacatcagtgttgataacttgttatcagcatatcccacgaaagataatggctacgtaggccagtataacactatgaatgggagtgctccagcagatgaagctcacgcacgctggcctttgagaacatatagtaatcagaattatgtcaatggccctcttgctgatgagttctttgacacagggaatgataccaatggggttgcatattccaggcagcagcaagctgatggcttcccagcacctcgccaagttgatgaaagtatggtattttatgatgccccatctgattacaacttggtggatggaaaagatgacttcgtatatctgaacgacattctgaatgagccacttggaaatgaatcgctctttgatggagatgatatgatggcttactttgatgccacagagaatgatttcaagtatgacattttgggctctggtcagggtttggattatccacttgcagacatgccgttgaactttgcccaaaagagtgacaaggaagacaagtttacattcgaagggatctctgaggttccggaagcaaatcctcagtacggtgcatcctcatctggttcacatgaagatctgtatactgatactgaatttctaggtgtaccaacagatgacactgctgataaaacttacggaaatcgcctggccagcatgttaggctctatcccagctccacctgcaatggcctcagaattcccgccgtcaacagggaaatctgctgggatgctttcggctgtcagctcgagctcaattcgttttactgctggtatcatccaacttgatggcctcactttcagcagcggctccggtcagtggcccttgcagaagaatggagacttgagtttgcttgtctcttttgctgtggagggcgacgtggcatccaagctccctgttggtcttgggcgtgctactcggattagcaccgttcccatggtgctgcgcagtggtttttaccttttctttatgtcggccatgattctcttgtttagctacaaagtagggtcgtgtatctacagcaggtaa

SEQ ID NO: 114 - protein, 657 aa, Zea mays
  ref <308>: DATABASE ACCESSION NUMBER: GRMZM2G113950
MSLSPLDSSSPPAAAAAAATEVPLAPGFRFHPTDEELVSYYLRRRVLGRRLRVDAIAEIDLYRLEPWDLPSLSRIRSRDAQWYFFARLDRKVAGAGAGGRGGPGNRTNRATPRGYWKTTGKDREVHHRGKPVGMKKTLVFHAGRAPKGERTNWVMHEYRLLDADGPQDLHVVCRIFQKHGSGPQNGAQYGAPYMEEEWEEDDDAIENGSTHDASGQIAATTCAVDEESNEDDENAYCETNRPARVEPSHLPSVHEMLNPPEMAPLQGQDSKETSDGSCSDVAISLEEILQEPLSNISVENMHRLEGQNATDDNISVDNLLSAYPTKDNGYVGQYNTMNGSAPADEAHARWPLRTYSNQNYVNGPLADEFFDTGNDTNGVAYSRQQQADGFPAPRQVDESMVFYDAPSDYNLVDGKDDFVYLNDILNEPLGNESLFDGDDMMAYFDATENDFKYDILGSGQGLDYPLADMPLNFAQKSDKEDKFTFEGISEVPEANPQYGASSSGSHEDLYTDTEFLGVPTDDTADKTYGNRLASMLGSIPAPPAMASEFPPSTGKSAGMLSAVSSSSIRFTAGIIQLDGLTFSSGSGQWPLQKNGDLSLLVSFAVEGDVASKLPVGLGRATRISTVPMVLRSGFYLFFMSAMILLFSYKVGSCIYSR

SEQ ID NO: 115 - DNA, 2241 bp, Zea mays
  ref <308>: DATABASE ACCESSION NUMBER: GRMZM2G180979
atgaacggcatgccgatctctgcgtcctctgcggcaagcgtcgacagtggcgcggtggcggccggcacgcccatgaagaatgcaacggcggcggacgctctcgccgagatggcgagacatcttaccgtcgacacggaagacaccttcgcgggcctgctggagctcgccgctgacgacgacgcagaggggctgcgcctcgcgctggagcgcgcgccacctgccgccgcggacgaggctggcctctggtacggccgccggaaggtcctggagcaccgcaccccgctgatggtcgctgccacctatgggagccttgccgcgctccgcctgctagtgtccatctcgtatgtggacgtcaaccgccgctcgggcacggacggcaccactgccctccactgcgccgcctctggtggctcacggacggctgttgagtcggtcaagctgcttctgggagccggggcagacgctaacaccatggatgacgccgggcgtcgtccggctgatgtgatctctgtgccaccgaagatgtttgatgccaagttcgcccttcaagatcttcttggattccccaagtctgagcatggcatgctccgggtggtgacaaggtccaccaactcgatctcatcgcctgtttcatcccccactgcagaggatgcacggtcaccgtctgcttctgtgatgatgatgacaaagttcgctgacttgcctagggttgcgacatcggagaagaaggaatatccagtggatccatcccttccagacatcaagaacagcatatatgcttccgatgagttccgcatgtactcgttcaagatccgcccttgctcacgggcatactcgcatgactggactgagtgcccatttgtccacccaggagagaatgctcggcgccgagacccccgcaagtaccactacagttgtgtgccatgcccagatttcaggaagggcgtatgccggcgcggagacatgtgtgaatatgctcatggagtgtttgagtgctggctccatccagcacagtaccggacgcgcctatgcaaggacggcacaagttgcaatcgtcgcgtctgtttctttgcccacacaactgatgaactccgtccattgtatgtctcgactggatcagcggtgccatctccaagagcttcagcaacagctgctatggagatggctgcagcaatgggcttgatgcccggttccccatcatcggtttccgcggtaatgtccccgtttaccccaccaatgtccccttcgggcaatgggatgcccccttcattgggctggcagcagccaaatgttccaactttacatcttcctggcagcagccttcagtcaagcaggctccgaacatcacttagtgcaagggatatgcctgctgatgactactccatgatgcgggatcttgattcccaacttatgaatgatctttgctattcccgtctcagttcatccacagggaaccactctgctagaaccaagtccctgaatccatcaaacctggatgacctcttctctgctgaaatgttatcatccccaaggtatagtaatgctgaccagggtgcaatgttttcaccttctcacaaggctgctatcctgaatcagttccagcagcagcagcaagcactgctgtctccaatcaacacaggagtttactctccaaagggcgtggacaaccagcagttaccttcacactcatcgctgctgcaagcatcactcgggatgccctcccctggccggatgtctccacgatgtgtcgaatcgggctccccaatgagctcccacctagccgctgctcttgtccagcgggagaagcagcagcagacaatgagaagtctcagctctcgtgaccttggtcctagcgcggcacgagcttcggctcttggctcccctctaagctcatcatggtctaagtggggatctccttcggggacaccagattggggcataaatggtgaagaattgggtaagctccggcgctcatcgtccttcgagctgaggtctggtggtgacgaccctgatctctcttgggtgcatacactggtcaaggaatctccaccggagaagcaagttactacggctgaatcaattagttccgttggaccctcaccactaatgcctcccggcatgaacaatggcgacggttctggcctgagcacccagctggatggacacgaccaagccgcggttataggagcgttgcttgaacagatgcagcttgaccagcagattggtagtctagcaacatag

SEQ ID NO: 116 - protein, 746 aa, Zea mays
  ref <308>: DATABASE ACCESSION NUMBER: GRMZM2G180979
MNGMPISASSAASVDSGAVAAGTPMKNATAADALAEMARHLTVDTEDTFAGLLELAADDDAEGLRLALERAPPAAADEAGLWYGRRKVLEHRTPLMVAATYGSLAALRLLVSISYVDVNRRSGTDGTTALHCAASGGSRTAVESVKLLLGAGADANTMDDAGRRPADVISVPPKMFDAKFALQDLLGFPKSEHGMLRVVTRSTNSISSPVSSPTAEDARSPSASVMMMTKFADLPRVATSEKKEYPVDPSLPDIKNSIYASDEFRMYSFKIRPCSRAYSHDWTECPFVHPGENARRRDPRKYHYSCVPCPDFRKGVCRRGDMCEYAHGVFECWLHPAQYRTRLCKDGTSCNRRVCFFAHTTDELRPLYVSTGSAVPSPRASATAAMEMAAAMGLMPGSPSSVSAVMSPFTPPMSPSGNGMPPSLGWQQPNVPTLHLPGSSLQSSRLRTSLSARDMPADDYSMMRDLDSQLMNDLCYSRLSSSTGNHSARTKSLNPSNLDDLFSAEMLSSPRYSNADQGAMFSPSHKAAILNQFQQQQQALLSPINTGVYSPKGVDNQQLPSHSSLLQASLGMPSPGRMSPRCVESGSPMSSHLAAALVQREKQQQTMRSLSSRDLGPSAARASALGSPLSSSWSKWGSPSGTPDWGINGEELGKLRRSSSFELRSGGDDPDLSWVHTLVKESPPEKQVTTAESISSVGPSPLMPPGMNNGDGSGLSTQLDGHDQAAVIGALLEQMQLDQQIGSLAT

SEQ ID NO: 117 - DNA, 1155 bp, Zea mays
  ref <308>: DATABASE ACCESSION NUMBER: GRMZM2G135381
atggaggtttcgcccgagtgcgcggacggcgggagggtcaagacggaggtggacctcttccttgtcgacgaactcctcgacctgccgtacgacgaggaggaggatgcgcgggaggcggtggtgggcgatggggaagcagcaggggacggtggtaagcaggcttcggtgctgcaccgggcttgtggcgacggcggggaggagggtgccgccggcaacgcgtcgaacgactcgtcagcggtgactgcgctggacagctgcagcaataattccctctccgtttccgggctcgccgacggggacttctccggcgggctgtgcgagccgtacgaccagctcgttgagctggaatggctgtccaactatatgggcgaggacaacctccccgcggaggacttgaagaagctgcggcttatcaacggcattccgccggccgccaccgccacggctcccgcggccgccgcgcaggcacagccgccagccgacggcgcgctgccaccggaggcgccagtgccaggcaaggcgcgcagcaagcggccgcgcgtcgcgccatgcagctgggccacccgcctgctggtgctcccgccgaccccggcgtcgccgccgtccgcggccatctcgccgtccgagtccggcaccgcggcgccggtggcgttcccggccaagaagccgtcgaagcccgcgaagaagaaggaggcgccgacgacgccggtgcccgacaacagcgccggcgcgggggagtcgaggcggtgcctgcactgcgagaccgacaagacgccccagtggaggacggggccgctgggccccaagactctgtgcaacgcgtgcggcgtgcggtacaagtcgggacgcctggtgccggagtaccgcccggcggcgagcccgacgttcgtggtgtccaagcactccaactcccaccgcaaggtgctggagctgcgccgccagaaggaggcgcacctccacccgcacccccaccagtaccagtaccagccgcagccgcagccgcagccgcaggcgtttgtccacggcggcggcggggccttggtgcacgcgccgacgccgctgttgttcgacgggccggcggcgccgctcatcggcgacgaccacttcttgattcacagccacatagtagggccggacttccggcagctcatctag

SEQ ID NO: 118 - protein, 384 aa, Zea mays
  ref <308>: DATABASE ACCESSION NUMBER: GRMZM2G135381
MEVSPECADGGRVKTEVDLFLVDELLDLPYDEEEDAREAVVGDGEAAGDGGKQASVLHRACGDGGEEGAAGNASNDSSAVTALDSCSNNSLSVSGLADGDFSGGLCEPYDQLVELEWLSNYMGEDNLPAEDLKKLRLINGIPPAATATAPAAAAQAQPPADGALPPEAPVPGKARSKRPRVAPCSWATRLLVLPPTPASPPSAAISPSESGTAAPVAFPAKKPSKPAKKKEAPTTPVPDNSAGAGESRRCLHCETDKTPQWRTGPLGPKTLCNACGVRYKSGRLVPEYRPAASPTFVVSKHSNSHRKVLELRRQKEAHLHPHPHQYQYQPQPQPQPQAFVHGGGGALVHAPTPLLFDGPAAPLIGDDHFLIHSHIVGPDFRQLI

SEQ ID NO: 119 - DNA, 927 bp, Zea mays
  ref <308>: DATABASE ACCESSION NUMBER: GRMZM2G068973
atggcaatggtggcggcgcagggaggcggccggagggacgccgaggcggagctcaacctgccgccggggttccggttccatcccaccgatgaggagctggtggtgcactacctctgcaggaaggtggcgtgtcagcagctgcccgtgcccatcatcgccgaggtcgacctttacaaattcgacccgtgggatcttccagagaaggcgctgtttggccgcaaggagtggtacttcttcacgccgcgggaccgcaagtacccaaacggctcgcgccccaaccgcgccgccgggagggggtattggaaggcaacgggcgcggacaagccgatcgcgcccaagggcggtggcggggcggcaggaatcaagaaggctctcgtcttctactccggcaaggcgcccaggggattcaagaccgactggatcatgcatgagtaccgcctcgcggacgcggaccgtgcgccgggcaagaagggctcacggaagttggatgagtgggtgttgtgccggctgtacaacaagaaaaacaattgggagaaggtgaaggctgaggagccggaggcggcggcgccgttccgtcaccagcagggcgcagcggaggattccatgtctgacagcttccagacgcacgactcggacatcgacaacaatgccttcggcatgcagaacggcttcggtaacatggtgcacgggcagaccatgaccatgaggaacggcattggcagcgtggcgaggacggtgaaggaggacaactattggtttaccgacctgaatctggatgatctacaggcaccctacaacgtgacccatgtgttgaatccgaaccctgttcagacgatgaatctggcagctgggcaaggccatggctacttgcagtctatgagctcgccgtcgacgaagatgtggcagaccatcttgcctccgttctga

SEQ ID NO: 120 - protein, 308 aa, Zea mays
  ref <308>: DATABASE ACCESSION NUMBER: GRMZM2G068973
MAMVAAQGGGRRDAEAELNLPPGFRFHPTDEELVVHYLCRKVACQQLPVPIIAEVDLYKFDPWDLPEKALFGRKEWYFFTPRDRKYPNGSRPNRAAGRGYWKATGADKPIAPKGGGGAAGIKKALVFYSGKAPRGFKTDWIMHEYRLADADRAPGKKGSRKLDEWVLCRLYNKKNNWEKVKAEEPEAAAPFRHQQGAAEDSMSDSFQTHDSDIDNNAFGMQNGFGNMVHGQTMTMRNGIGSVARTVKEDNYWFTDLNLDDLQAPYNVTHVLNPNPVQTMNLAAGQGHGYLQSMSSPSTKMWQTILPPF

SEQ ID NO: 121 - DNA, 1497 bp, Zea mays
  ref <308>: DATABASE ACCESSION NUMBER: GRMZM2G159996
atgaagagctgcggcgggggaggagcggacgggcagcagtgcccgtgcgactactgcggggaggcggcggcggctctgcactgccgcgcggacgccgcgcgcctctgcgtcgcgtgcgaccgccacgtgcacgccgccaacgcgctttcgcggaagcacgtgcgggcgccgctctgcgcagggtgcgccgcgcgcccggccgccgcgcgcgtctccctcggcgccgacccggcgttcctctgcgcggactgctgcgagggctgcgccgccgcttccgcggcgcgcgtgtcggttgagggcttctcggggtgcccctcggcggccgagctcgccgcgtcatgggggctcgacctccgccgcgcggccgtggccgtgggcgacgacggcgacggcggcgacgacgacgaccccttcctctcggtgctcgactactccgtgctgggggtgggggtggccgacacggacctgcgcgacctctacgtgccgtgcgacccaccgcgggtgcccgtccccgacgccggcgcgcgcccgctcaggggcgaggcgctgtgcgaccagctcgcggagatggcgcggcgcgacgaggcggacacgtcccacgcgcacccgcactcggatctgagcccgcgcacgcctcgccgcacctccgcggcttccagcggacgcctgccgtcgggcaagatggcgccccccgcggcgctgccggtgccggctcatcctcctcccgccgcgccgcaggaggtgcctctgccgtacacgtccctgctcatgatggcgtccgccaactgcagcgacctcattggcggcggcgaccgggtgggtgataccgacgaacaactgctctgggactgcgctgcgccctcggtgccgcccacccagatatgggacttcaatttaggacggtcaaggcatcacgatgagaaatctgctcttgaagttggatacggttctaaccatggcggctttatgattaagagttacagtgacatgcttaaggacatttcttcggggacaacgaaagatctggaagatatttatgactcaagatactgctcaaccgccgaagatatcatgtcctctaatatctgtcagttgtcatcgaaaaatgtgagcaccgggagcaacaaacggaaggtgaggtcatgtgctgcgtcgacgatggatggaccaacgacctccgggaaccacaaccacgtacccgcttcagcttcaggtccaggagcagcgctcaccagggagatctccttcggggatcagacggtgtccgcccccgcggccgagaccgagaggcctgccgccgtgaggatcgacagcgagacgcttgcgcagaacagggacagcgccatgcagcggtacagggagaagaagaagaaccgcaggtacgagaagcacatccggtacgagtcgaggaagctgcgggcggacacgaggaagcgggtgaaagggcggttcgtcaagtcgaccgaagcactcaacgccgccagatacaacggatga

SEQ ID NO: 122 - protein, 498 aa, Zea mays
  ref <308>: DATABASE ACCESSION NUMBER: GRMZM2G159996
MKSCGGGGADGQQCPCDYCGEAAAALHCRADAARLCVACDRHVHAANALSRKHVRAPLCAGCAARPAAARVSLGADPAFLCADCCEGCAAASAARVSVEGFSGCPSAAELAASWGLDLRRAAVAVGDDGDGGDDDDPFLSVLDYSVLGVGVADTDLRDLYVPCDPPRVPVPDAGARPLRGEALCDQLAEMARRDEADTSHAHPHSDLSPRTPRRTSAASSGRLPSGKMAPPAALPVPAHPPPAAPQEVPLPYTSLLMMASANCSDLIGGGDRVGDTDEQLLWDCAAPSVPPTQIWDFNLGRSRHHDEKSALEVGYGSNHGGFMIKSYSDMLKDISSGTTKDLEDIYDSRYCSTAEDIMSSNICQLSSKNVSTGSNKRKVRSCAASTMDGPTTSGNHNHVPASASGPGAALTREISFGDQTVSAPAAETERPAAVRIDSETLAQNRDSAMQRYREKKKNRRYEKHIRYESRKLRADTRKRVKGRFVKSTEALNAARYNG

SEQ ID NO: 123 - DNA, 1194 bp, Zea mays
  ref <308>: DATABASE ACCESSION NUMBER: GRMZM2G018487
atggaggggatggaggaggccaacaggacggcagtggagagctgccaccgggtgctggcgctcctctccaacccgcacggccagctcgtccccagcaaggagctcgtggccgccaccggggaggccgtcgccaagttcggctcactgacggccaagctctccaactccaacggcgatggcctactgcagggccacgctagggtcaggaaggtcaagaagcccctgcacatcttcgacagcaacctcttcctcgagagctctgcggtggccgccgccgctgctccggccaagacgcccagcccgagcccgatccttggcctccagctgttcccgaggtaccaccagtttgagggctcgtcgtctaaggatcctgtcaggatccctacccagttccccaagaggttgctgctagagaagccgactgccggtatggaggggtcgacgtcgcagtcccctccgatcgtccagatggtccagccggtgtccgttgcgccccccgcagggacgcccaccccggcattgccccccgctcaccttcatttcatccagcagcagcaaagctaccagaggtttcagctcatgcagcagatgaagatccagagcgagatgatgaagaggagcaatcttggtgatcagggtggtagcttaagtggcggcggcggcggcggtcgtaagggtgtgaatctcaagtttgacagctctaattgcacggcgtcatcgtctcgctcgttcctttcgtctctgagcatggaagggagtcttgcgagtttggatggaagccggaccagcaggccgttccagctacttagtggctctcagacagctagcacgccggagctgggcctggtgcaaaggagaaggtgcgctggcagggaggatgggactggtcggtgtgcaaccgggagccggtgccattgttcaaagaaaaggaagctaaggataaggaggtccatcaaagtccctgcaataagcaacaaggttgcagacatcccagctgatgaattctcatggaggaagtatgggcagaagccaattaagggatccccacatcctaggggttattacaagtgtagcagtgtgagaggctgccccgcgaggaagcatgtcgagaggtgcgtggacgacccctcgatgctgattgttacctatgaaggtgaccacaaccacaaccgagttctagcccagccagcctga

SEQ ID NO: 124 - protein, 397 aa, Zea mays
  ref <308>: DATABASE ACCESSION NUMBER: GRMZM2G018487
MEGMEEANRTAVESCHRVLALLSNPHGQLVPSKELVAATGEAVAKFGSLTAKLSNSNGDGLLQGHARVRKVKKPLHIFDSNLFLESSAVAAAAAPAKTPSPSPILGLQLFPRYHQFEGSSSKDPVRIPTQFPKRLLLEKPTAGMEGSTSQSPPIVQMVQPVSVAPPAGTPTPALPPAHLHFIQQQQSYQRFQLMQQMKIQSEMMKRSNLGDQGGSLSGGGGGGRKGVNLKFDSSNCTASSSRSFLSSLSMEGSLASLDGSRTSRPFQLLSGSQTASTPELGLVQRRRCAGREDGTGRCATGSRCHCSKKRKLRIRRSIKVPAISNKVADIPADEFSWRKYGQKPIKGSPHPRGYYKCSSVRGCPARKHVERCVDDPSMLIVTYEGDHNHNRVLAQPA

SEQ ID NO: 125 - DNA, 1428 bp, Zea mays
  ref <308>: DATABASE ACCESSION NUMBER: GRMZM2G026833
atgcttgcagtgtcgccgtcgccggtgcggtgtgccgatgcggaggagtgcggcggaggaggcgccagcaaggaaatggaggagaccgccgtcgggcctgtgtccgactcggacctggatttcgacttcacggtcgacgacatagacttcggggacttcttcctcaggctagacgacggggatgacgcgctgccgggcctcgaggtcgaccctgccgagatcgtcttcgctgacttcgaggcaatcgccaccgccggcggcgatggcggcgtcacggaccaggaggtgcccagtgtcctgccctttgcggacgcggcgcacataggcgccgtggatccgtgttgtggtgtccttggcgaggacaacgacgcagcgtgcgcagacgtggaagaagggaaaggggagtgcgaccatgccgacgaggtagcagccgccggtaataataatagcgactccggtgaggccggctgtggaggagcctttgccggcgaaaaatcaccgtcgtcgacggcatcgtcgtcgcaggaggctgagagccggcgcaaggtgtccaagaagcactcccaagggaagaagaaagcaaaggtggattggacgccggagcttcaccggagattcgttcaggcggtggaggagctgggcatcgacaaggcggtgccgtccaggatcctcgagatcatggggatcgactccctcacgcggcataacatagccagccatctgcagaagtaccgttcccacaggaagcacatgcttgcgagggaggtggaggcagcgacgtggacgacgcaccggcggccgatgtacgctgcccccagcggcgccgtgaagaggcccgactctaacgcgtggaccgtgccgaccatcggtttccctccgccggcggggacccctcctcgtccggtgcagcacttcgggaggccactgcacgtctggggccatccgagtccgacgccagcggtggagtcaccccgggtgccaatgtggcctcggcatctcgccccccgcgccccgccgccgccgccgtgggctccgccaccgccagctgacccggcgtcgttctggcaccatgcttacatgagggggcctgctgcccatatgccagaccaggtggcggtgactccatgcgtggcagtgccaatggcagcagcgcgtttccctgctccacacgtgaggggttctttgccatggccacctccgatgtacagacctctcgttcctccagcactcgcaggcaagagccagcaagacgcgctgtttcagctacagatacagccatcaagcgagagcatagatgcagcaataggtgatgtcttaacgaagccgtggctgccgctgcccctcggactgaagcccccttcggtagacagtgtcatgggcgagctgcagaggcaaggcgtagcgaatgtgccgcaagcttgtggatga

SEQ ID NO: 126 - protein, 475 aa, Zea mays
  ref <308>: DATABASE ACCESSION NUMBER: GRMZM2G026833
MLAVSPSPVRCADAEECGGGGASKEMEETAVGPVSDSDLDFDFTVDDIDFGDFFLRLDDGDDALPGLEVDPAEIVFADFEAIATAGGDGGVTDQEVPSVLPFADAAHIGAVDPCCGVLGEDNDAACADVEEGKGECDHADEVAAAGNNNSDSGEAGCGGAFAGEKSPSSTASSSQEAESRRKVSKKHSQGKKKAKVDWTPELHRRFVQAVEELGIDKAVPSRILEIMGIDSLTRHNIASHLQKYRSHRKHMLAREVEAATWTTHRRPMYAAPSGAVKRPDSNAWTVPTIGFPPPAGTPPRPVQHFGRPLHVWGHPSPTPAVESPRVPMWPRHLAPRAPPPPPWAPPPPADPASFWHHAYMRGPAAHMPDQVAVTPCVAVPMAAARFPAPHVRGSLPWPPPMYRPLVPPALAGKSQQDALFQLQIQPSSESIDAAIGDVLTKPWLPLPLGLKPPSVDSVMGELQRQGVANVPQACG

SEQ ID NO: 127 - DNA, 1812 bp, Zea mays
  ref <308>: DATABASE ACCESSION NUMBER: GRMZM2G095727
atgtctacgaatgattctatgagtatggtgtttaagtgtttgtcgaagggagcagttgatttcttggtaaaaccactacgtaagaatgagcttaagaacctttggcagcatgtttggaggcgatgccacagttccagtggaagtgaaagtggcatccagacacagaagtgtgccaaactaaatactggcgacgagtatgagaacggcagtgacagcaatcatgatgatgaagaaaatgatgacggcgacgatgacgacttcagtgttggactcaatgctagggatggaagtgacaatggcagtggtactcaaagctcatggacaaagcgtgctgtggagattgacagcccacaacctatatctcccgatcaactagttgatccacctgatagtacatgtgcacaagtaattcaccctagatcagagatatgcagtaacaagtggttaccgacagcaaacaaaaggaatgtcaagaaacagaaggagaataaagatgaatctatgggaagatacttaggaataggtgctcctaggaactcaagtgcagaatatcaatcatctctcaatgatgtatctgttaatccaatagaaaaaggacatgagaatcacatgtccaaatgcaaatctaaaaaggaaacaatggcagaagatgattgtacaaacatgcctagtgcaacaaatgctgaaactgctgatttgattagctcaatagccagaaacacagaaggccaacaagcagtacaagccgttgacgcaccagatggcccttccaaaatggctaatggaaatgataagaatcatgattctcatatcgaagtgacaccccatgagttgggtttgaagagatcgagaacaaatggagctacagcggaaatccatgatgagcgaaatattctgaaaagatcagatcagtcagccttcaccaggtaccatacatctgtggcttccaatcaaggtggagcaagatatggggaaagctcttcaccacaagataacagttctgaggccatgaaaacggactctacatgcaagatgaagtcaaattcagatgctgctccaataaagcagggctccaatggcagtagcaataacgatgtgggatccagtacaaagaatgttgctgcaaggccttcgggtgacagggagagagtagcgtcaccattagccatcaaatctacccagcatgcctcagcatttcatactatacagaatcaaacgtcaccagctaatctgattggggaagacaaagctgatgaaggaatttccaatacagtgaaaatgagccacccaacagaggttccacaaggctgcgtccagcatcatcatcatgtgcattattacctccatgttatgacacagaaacagccatcaacagaccgtggatcatcagatgttcactgtggttcgtcaaatgtgtttgatcctcctgttgaaggacatgctgcaaactacagtgtgaatgggggtgtctcagttggtcataatgggtgcaatgggcagaatggaagtagcgctgtccccaatattgcaagaccaaacatagagagtattaatggtaccatgagccaaaatattgccggaggtggcattgtaagtgggagtgggagtggcaatgacatgtatcagaatcggttcctgcaacgagaagctgcattgaacaaattcagactgaagcggaaagatcggaactttggtaaaaaggttcgctaccaaagcaggaagaggcttgctgagcagcggccacgggtccgaggacagtttgtgcgacaatctgagcaagaagatcaaacagcgcaaggttcagaaagatga

SEQ ID NO: 128 - protein, 603 aa, Zea mays
  ref <308>: DATABASE ACCESSION NUMBER: GRMZM2G095727
MSTNDSMSMVFKCLSKGAVDFLVKPLRKNELKNLWQHVWRRCHSSSGSESGIQTQKCAKLNTGDEYENGSDSNHDDEENDDGDDDDFSVGLNARDGSDNGSGTQSSWTKRAVEIDSPQPISPDQLVDPPDSTCAQVIHPRSEICSNKWLPTANKRNVKKQKENKDESMGRYLGIGAPRNSSAEYQSSLNDVSVNPIEKGHENHMSKCKSKKETMAEDDCTNMPSATNAETADLISSIARNTEGQQAVQAVDAPDGPSKMANGNDKNHDSHIEVTPHELGLKRSRTNGATAEIHDERNILKRSDQSAFTRYHTSVASNQGGARYGESSSPQDNSSEAMKTDSTCKMKSNSDAAPIKQGSNGSSNNDVGSSTKNVAARPSGDRERVASPLAIKSTQHASAFHTIQNQTSPANLIGEDKADEGISNTVKMSHPTEVPQGCVQHHHHVHYYLHVMTQKQPSTDRGSSDVHCGSSNVFDPPVEGHAANYSVNGGVSVGHNGCNGQNGSSAVPNIARPNIESINGTMSQNIAGGGIVSGSGSGNDMYQNRFLQREAALNKFRLKRKDRNFGKKVRYQSRKRLAEQRPRVRGQFVRQSEQEDQTAQGSER

SEQ ID NO: 129 - DNA, 1320 bp, Zea mays
  ref <308>: DATABASE ACCESSION NUMBER: GRMZM2G010929
atggccatcctgggtgccctcaggctcgcgccgtctccacccgccctcgccggcgccgcgccaccggcgacgtcgccgtatacggctgtacgctcctccgtgcacttccgcctcgccaatgccggcgccgccgcgctcgtcgccgcctcgctcctcgccgccgaccccgccgtggctttcattggaggaggaccgtacgggaagcaggtgacgcgggggcaggacctcaccggcaaggacttcagcggccagacactcatcaagcaggacttcaagacgtctatactgaggcaggcgaacttcaaaggcgcgaacctgctcggcgcgagcttcttcgatgcagacctcacaagcgctgatctctctgacgctgatcttagaggcgctgatttgtcgctggcgaatttaacgaaggcaaacttatcaaatgccaacttagaaggggcacttgccactgggaacacttctttcaaagattttaccgatgtgccgctgcgagatgatcaacgggagtacctctgcaaaatcgctgacggatggagatgtttacagtacattacctttggaacaaaagaccaggttcgctttgggtatttatcacgagaagttgagaacttccacaagtttcttagttttgtcacaagaggtttcattattattggctctatacctaaatggagaggagagacaaacctaggcggcgctggtagatggcgagatcgggccgaggaagtcgaggcagatgcaaacgacagcactgccatcgccgctgcttccatcgcccacggaaaccctagccccgcacgctctcccgccctcacacgcgagagtggtggcgccggcggtggagcgggaggaggcagcggcagcgtggtggcgtcggcggtgtgccgccccagcggctcgcggtggacgccgacgctggagcagatcaggatgctgaaggagctctactacggctgcgacatccggtcgcccagctcggagcagatccagcgcatcaccgccatgctgcgccagcacggcaagatcgagggcaagaacgtcttctattggttccagaaccacaaggcccgcgagcgccagaagcgccgcctcacaggatctacgtcgtggcctcgcggggggcggggggcgagattggagaggggcagggaccgggatgggagaggggtggtacgaggagacggaggacggggaagagacagcgccagacgcggagaagggcgaggagacggagcacagggaggagacgatgctgggggtgcgcaaatcgcgtggcgtgggggcgcaaatcgcgtgcgaggaggacgacggtag

SEQ ID NO: 130 - protein, 439 aa, Zea mays
  ref <308>: DATABASE ACCESSION NUMBER: GRMZM2G010929
MAILGALRLAPSPPALAGAAPPATSPYTAVRSSVHFRLANAGAAALVAASLLAADPAVAFIGGGPYGKQVTRGQDLTGKDFSGQTLIKQDFKTSILRQANFKGANLLGASFFDADLTSADLSDADLRGADLSLANLTKANLSNANLEGALATGNTSFKDFTDVPLRDDQREYLCKIADGWRCLQYITFGTKDQVRFGYLSREVENFHKFLSFVTRGFIIIGSIPKWRGETNLGGAGRWRDRAEEVEADANDSTAIAAASIAHGNPSPARSPALTRESGGAGGGAGGGSGSVVASAVCRPSGSRWTPTLEQIRMLKELYYGCDIRSPSSEQIQRITAMLRQHGKIEGKNVFYWFQNHKARERQKRRLTGSTSWPRGGRGARLERGRDRDGRGVVRGDGGRGRDSARRGEGRGDGAQGGDDAGGAQIAWRGGANRVRGGRR

SEQ ID NO: 131 - DNA, 1779 bp, Zea mays
  ref <308>: DATABASE ACCESSION NUMBER: GRMZM2G108228
atgaagatgaaaacggcagtaaacaggggccagaccgcacaaaggaaggaaggaaggcggttttttcggacgtggcgtgtccactcatcttctcacctctttcttcacgctgttttgtcctctcctcgcctcgcccggccccatccatctcggcatctcgctcgtcgtcctcctctcccctccataaaatccgatcggcagctcctggccgctgcccactcctccccgctctggctcttcctcgcgcctcgcgcgcccacccaccttcacgcgctctcccagctagatcgaccccactggcaatcgcgcaggctcccctatcccttcctgttccttcaaaaagactggactggatcttcccagagttcccgttcggagagccgccggatcttcttcgacgaggcttcgatctgctgctctccgtcggcgtgttggggacttgcaccttatccgaagatgtcttttcggagcatggttcgtgatataagggaaagttttgggaatatatcgaggcggaactttgaggtgagaattcaccacagagggaagtctcttgggtcttcaggtgacttgcaagacaggcctgctgaagttcagcaaagcaggtgggctagccttcctcctgagttgctctgcgatgtgatgaaaaggttggaggaagatgacagtagctggccggatcgcaaggatgttgtttcctgtgcatctgtttgtacaacctggagggatatgtgtaaggatattgttagaagtccagaacattgtgcaaagctcacatttccagtatctcttaagcagcctggaccccgagacggggtaatccaatgtttcataaaaagggacaaatcaaagctaacgtaccggctctacttgtcccttagctctggtgtgcttgatgagaacgggaagttcctgctagcagcgaaaaggagccgcaggatggcgcacacggagtatgcaatttttatggactcgaggaatttctcccgatcgagcactggctacattgggaagctaaggtcaaatttccttggaactaaatttatcatctacgacacacaggctccgtacaatggcgggagagtttgcacacaggaacgtgcccccagccgtcggttgtcttccaggaaagtttcaccaagagttccaagcggcagctaccccgtcgctcaggtgaactacgagctgaatgtgctgggaacccgagggcccaggcggatgcagtgcgctatgcattccatccccgcatcagcggtggagcccggcggcgtggtgcctgggcaaccgaaagagctcctcccgaggctgttcgacgagtccttccgcagcaccgcaacttcctctttctccaagtactccgtcgcggacagctccatggacctgggcagctgcccgttctccgaggtcgaggtgggcgggggaagtctgcgagaaggtgacgagtcggagaaggagaggccactggttctgcgcaacaaggcgccgaggtggcacgagcagctgcagtgctggtgcctcaactttcgcgggcgcgtcaccgtggcctcggtcaagaacttccagctgatagctcctgcaaagacgcagccgcagccgcaggcctccggccccccgccgccgccgccgccgtcgtcgtcgtcgtaccatgacccggtgatcctgcagttcggcaaggtcgggagggacatgttcaccatggactaccggtacccgctgtcggccttccaggccttcgccatatgtctgacgagcttcgacaccaagctggcctgtgaatga

SEQ ID NO: 132 - protein, 592 aa, Zea mays
  ref <308>: DATABASE ACCESSION NUMBER: GRMZM2G108228
MKMKTAVNRGQTAQRKEGRRFFRTWRVHSSSHLFLHAVLSSPRLARPHPSRHLARRPPLPSIKSDRQLLAAAHSSPLWLFLAPRAPTHLHALSQLDRPHWQSRRLPYPFLFLQKDWTGSSQSSRSESRRIFFDEASICCSPSACWGLAPYPKMSFRSMVRDIRESFGNISRRNFEVRIHHRGKSLGSSGDLQDRPAEVQQSRWASLPPELLCDVMKRLEEDDSSWPDRKDVVSCASVCTTWRDMCKDIVRSPEHCAKLTFPVSLKQPGPRDGVIQCFIKRDKSKLTYRLYLSLSSGVLDENGKFLLAAKRSRRMAHTEYAIFMDSRNFSRSSTGYIGKLRSNFLGTKFIIYDTQAPYNGGRVCTQERAPSRRLSSRKVSPRVPSGSYPVAQVNYELNVLGTRGPRRMQCAMHSIPASAVEPGGVVPGQPKELLPRLFDESFRSTATSSFSKYSVADSSMDLGSCPFSEVEVGGGSLREGDESEKERPLVLRNKAPRWHEQLQCWCLNFRGRVTVASVKNFQLIAPAKTQPQPQASGPPPPPPPSSSSYHDPVILQFGKVGRDMFTMDYRYPLSAFQAFAICLTSFDTKLACE

SEQ ID NO: 133 - DNA, 3261 bp, Zea mays
  ref <308>: DATABASE ACCESSION NUMBER: GRMZM2G169820
atggaggcgccggggacgagctcgggcggcgccggaggcgagggggccgggggcaccaaggtcaacgaggagctgtggtacgcgtgcgcgggaccgctcgtggcgctgccgccggcggggagcctcgttgtctacttcccgcagggacacagcgagcaggtagcagcatctatgcgaaaggatgcagatgccaaaattccgagctatccaaatctctcatctaagcttatatgcatactccgtagtgtcactatgcttgctgatcctgacacagatgaggtttacgctcgaatgactctccagcccgttagcaatgtgacgcattgtgacaaggagacgttgctggcaacagagcttgcactgaaacaaaccagaccacagacagagttcttttgtaaaacactgactgcaagtgatacaagcactcatggaggtttctctgtgccacggcgtgctgcagagcgaattttcccccatcttgacttctcagtgcagcctcctgctcaggaactgcaggccagggatttgcacgatgcaatttggacattccgtcatatatatcgaggccagcctaaaaggcatttgctgactactggctggagcctatttgtcagtggaaagagactccttgctggtgattcagtcctgtttattagggacggaagacagcaactcctcttggggataaggcgagcaaataggcagcccgttaacctctcatcatctgttttgtctagcgacagtatgcatattggaattcttgctgctgcagcccatgcagcagccaataacagccaattcacagtattctataacccaagggctagtccttcagaatttgttattccttttgccaagtaccagaaggccgtctatagcaaccaactatcacttggcatgcggtttagaatgatgtttgaaactgaagaatctgcaacaagaaggtacatgggaacaataactggtataagtgatatggatcctttaaggtggaaaaactcccaatggcgcaatattcaggttgcatgggatgaagcagcaccaagtgagagacgcaccagggtttccctttgggaggttgaacctgttatcgctccattcttcatttatccctcgccattgttcactgcaaaacgtccgaggcaacctggggtaacagatgatgatagctcagaaatggacaatctttttaagcggaccatgccatggtttggtgaggaggttggcaagagagatctgagtactcaaaacggtttagttcctggattaagtttggttcagtggatgaatatgcaacacaacccctctcttgccaacacggttatgcaaccggaattgctaaattcgttagctggaaaacctgtacaaactctggctgcggctgatctatctaggcaaattagcttccagccccagttcctgcaacaaaataacatccagttcaacacttcgctgctacctccccaaaaccagcagaccgaacagttagcaaatgtaatagctacaccaaaccaattgggaagtgttatagtaccacaaaaggcagttcaaaattccagttctgaacagaaacagaatctggttacacaaccactgcaagtcagccaaccaatggttagtgtggcacagcctcaacttgtccatactcaactccagcaacctcaagtagttctccaggctcagcctcagcaacctcaagtcattgtccaagctcaactacaacaacagcaacctctggttcaaaatcacaccaccatacaaagtggccttcaacaaatccagcttctgcagcaacagcaagttcagcagtcagtgcaggaacaacagcaaataaagatacagccttttcaggtacctaatgatgccaacatggtaacacagttatctgatcagatgaaaatacaactattgaaggctctacagccacagcagcctctggtcatggaacagcagaaaatgatatttgatttgcagcaacaagcagtaaattctcagtcaactgctcagcagtgctcacaggtagctacccaagtggttggtttgcatagcagtagcactaatcagtacccgacgcagcaaaagactcaacctctcaaaacatttcaagattttcctgggaatgctgtttctattgtaaaaccagaaattgtcacctccgtgggtgctcgctctttgcatgtgcctggtggagtgcagtcaatgaagatggatgaagttccctcttcttcaacatcgccatccacaaacaacaatcctgttattttgcgatcaactccaagtagctccaagaaccaatgtttacctactgcagcaaaggctcctcagtcatctgttgtattgggttctacacttgaacagggtatgaagccttgtgacagtacacaacacccaatggtgattcccaagctggctgaagaaaggccagctactggacaagactacatgaacagcactcagctggattatttggatacgtcatcttcagcgacttcagtttgcctttcacaggctgacggatcgctgcaacaaagttttccaccttcatccttcaatcagcatcaaccgttgagggaagcagttccagatagcgagtttgaggttacagatgcaggaaataactttctatttggggcaaatattgatggccatatggagcctcttaacgaagacgatttgcttggaactgccttcgaagctgacaagtacatggaacagatgccaggaaacggcatctctaactacatttcatcaaaggattctcagcaagagttatcatcttcaatgatctcacatccatttggcgttgctgatatcgcgttcaattccatagattcgtcgatcaatgatatccaattcttaaacagaaattcccgggctccaggtcctgttcaacaacgtatgcgaacatacaccaaggtgcacaagcgtggcgctgttggaagatctatcgacatcaacagatattctggttacgatgaactgaagcatgacgttgcccgtatgtttggaattgaggggcagctcagcgaccaaaacagagttggctggaaactggtttacgaagatcacgagaaggatgtcctattagttggtgatgacccatgggaggacttcgtgaactgcgtgcggtgcatcaggattctttcgccgcaggaagagaggcaaatgaggctggccagcgactacggagacagctttcttggcaaccaagcgtgtagcagctcggacgggggtcgtccgtggagggtcaccggcgactag

SEQ ID NO: 134 - protein, 1086 aa, Zea mays
  ref <308>: DATABASE ACCESSION NUMBER: GRMZM2G169820
MEAPGTSSGGAGGEGAGGTKVNEELWYACAGPLVALPPAGSLVVYFPQGHSEQVAASMRKDADAKIPSYPNLSSKLICILRSVTMLADPDTDEVYARMTLQPVSNVTHCDKETLLATELALKQTRPQTEFFCKTLTASDTSTHGGFSVPRRAAERIFPHLDFSVQPPAQELQARDLHDAIWTFRHIYRGQPKRHLLTTGWSLFVSGKRLLAGDSVLFIRDGRQQLLLGIRRANRQPVNLSSSVLSSDSMHIGILAAAAHAAANNSQFTVFYNPRASPSEFVIPFAKYQKAVYSNQLSLGMRFRMMFETEESATRRYMGTITGISDMDPLRWKNSQWRNIQVAWDEAAPSERRTRVSLWEVEPVIAPFFIYPSPLFTAKRPRQPGVTDDDSSEMDNLFKRTMPWFGEEVGKRDLSTQNGLVPGLSLVQWMNMQHNPSLANTVMQPELLNSLAGKPVQTLAAADLSRQISFQPQFLQQNNIQFNTSLLPPQNQQTEQLANVIATPNQLGSVIVPQKAVQNSSSEQKQNLVTQPLQVSQPMVSVAQPQLVHTQLQQPQVVLQAQPQQPQVIVQAQLQQQQPLVQNHTTIQSGLQQIQLLQQQQVQQSVQEQQQIKIQPFQVPNDANMVTQLSDQMKIQLLKALQPQQPLVMEQQKMIFDLQQQAVNSQSTAQQCSQVATQVVGLHSSSTNQYPTQQKTQPLKTFQDFPGNAVSIVKPEIVTSVGARSLHVPGGVQSMKMDEVPSSSTSPSTNNNPVILRSTPSSSKNQCLPTAAKAPQSSVVLGSTLEQGMKPCDSTQHPMVIPKLAEERPATGQDYMNSTQLDYLDTSSSATSVCLSQADGSLQQSFPPSSFNQHQPLREAVPDSEFEVTDAGNNFLFGANIDGHMEPLNEDDLLGTAFEADKYMEQMPGNGISNYISSKDSQQELSSSMISHPFGVADIAFNSIDSSINDIQFLNRNSRAPGPVQQRMRTYTKVHKRGAVGRSIDINRYSGYDELKHDVARMFGIEGQLSDQNRVGWKLVYEDHEKDVLLVGDDPWEDFVNCVRCIRILSPQEERQMRLASDYGDSFLGNQACSSSDGGRPWRVTGD

SEQ ID NO: 135 - DNA, 1776 bp, Zea mays
  ref <308>: DATABASE ACCESSION NUMBER: GRMZM2G098884
atgagcaacaaggaggagaaagaatgccaaatgaccaaagaagagaagaggcggaagaagagggagaaacataaggacatgggtcagagcggcgattatgagggtaaggctgttatgagcaacaaggaggagaaagactgccaagtaaccgaagaagagaagaaacggaagaaggggaagaagcataaggacaagggtcagggcagcaattctgatagctcatgtgccaggaaccatagcattgagatggagcaagctgatgtgtcagccaagatggctgaagactcctgcttggagcatgcagaggctgttacgagcaaaagctctgcgaagaaacacaggaagaaaaagaggaaagataaagaggttgaaactattggccagaagcagatactcgatgctgatgaaaatgttgggtcagaagatacgaagaggaacagcagagaaagggaacatgataggaagtcaaagaagcacaaacgaaagcatcaggatgacgagactgcctcaaatggttcttctggtaatcaaattgttttaggggaagataagaggacggaaaaagagtatttagttaccttggatttggaagaggacaataaatctgatatgtcaaagattgggaagaagacagatagcaagaagaagaggagaaaagagagaaatgatggtgttgacctaagacaaaatacactagttggagagggcaagaatggtaagaataacaaagagaaaaaaatgtgtgaggatgagaatggtggcggtgaaagagagaaagaaaacatgggaaagcagaaggataagtgtagacgagtgagcttcactgatcatgtggaggtgtttaatataggtggtagtgatgatgtagagggtgatgggagtggtgaaactgaacttgtgcatggacgacggtttagccctgaggaagatgcaaagctaatggaagcgatattgaaatatgcagagttgaagcaattaggagagaaagggttacagatgattggggaaagtaataagcatccagagaccaggggttgttgggctgaaataggaaaagcattacctcatagacccaagaaagccaaatacgcgcgtggaaaggttttacttcaaaggagtgctgaacgtaaatggaccgctgaggagtatgagataattcgacggtttgttgaaaagaacggccgaaattggaaggtattagcaaaagaacttggaaagagtgaaatccatgtaaaagatacttggagacgaataaagttcaaaaatttgaaaagagggacttggagtcaggatgagtaccaaaacttgtttgatttggtaaatctggacatgcgtgtgaaagcccatcaaaacatcaatactggtcaccgtcatataagagataacatttcttgggaggctatcagtgaaaaattaaccactcgtagagccgaagaatgctgcacgaaatggtacgggcaattggcatcgccgctggttaaacaaggaatctgggcagatacagatgactacatgttagtggaagcgcttcaaaatgtcgatgctgtttgtgctgaagatgtggactgggagaaccttctcgagcacaggtctggggagctttgccgtcatagatggaaccagatgattcgcctgatgggtgaccacagatataggcctttcattgagcaagtggaagtgcttgcaaggcggtactgcccagagatgcttgcgtacaggaaaccagtcgcaggtggatcctcggccgacgaacctgctggagcctctgacttgtaa

SEQ ID NO: 136 - protein, 591 aa, Zea mays
  ref <308>: DATABASE ACCESSION NUMBER: GRMZM2G098884
MSNKEEKECQMTKEEKRRKKREKHKDMGQSGDYEGKAVMSNKEEKDCQVTEEEKKRKKGKKHKDKGQGSNSDSSCARNHSIEMEQADVSAKMAEDSCLEHAEAVTSKSSAKKHRKKKRKDKEVETIGQKQILDADENVGSEDTKRNSREREHDRKSKKHKRKHQDDETASNGSSGNQIVLGEDKRTEKEYLVTLDLEEDNKSDMSKIGKKTDSKKKRRKERNDGVDLRQNTLVGEGKNGKNNKEKKMCEDENGGGEREKENMGKQKDKCRRVSFTDHVEVFNIGGSDDVEGDGSGETELVHGRRFSPEEDAKLMEAILKYAELKQLGEKGLQMIGESNKHPETRGCWAEIGKALPHRPKKAKYARGKVLLQRSAERKWTAEEYEIIRRFVEKNGRNWKVLAKELGKSEIHVKDTWRRIKFKNLKRGTWSQDEYQNLFDLVNLDMRVKAHQNINTGHRHIRDNISWEAISEKLTTRRAEECCTKWYGQLASPLVKQGIWADTDDYMLVEALQNVDAVCAEDVDWENLLEHRSGELCRHRWNQMIRLMGDHRYRPFIEQVEVLARRYCPEMLAYRKPVAGGSSADEPAGASDL

SEQ ID NO: 137 - DNA, 672 bp, Zea mays
  ref <308>: DATABASE ACCESSION NUMBER: GRMZM2G110582
atgctggctccgccactgattggaattgagaaaaaaaatataggccttgggacatggagcagaggaaggaagcttgagaagcaggatagcagacgtaccaccacggctatggggaggccaagcagggggaggcagcgcatcgagatccgccacatcgaggatggcggccggctgcaggtcaccttctccaagcgcaagtctggcctgcaaaagaaggcctccgagctctttctgctctgcggctcgcccgtcgccatcgtcatcttctcccctggcaaaaaggtgttcgcgctgggcactccctcagtcgaccacgtcctccgccgctatgctccgatccccggcgaagaagaggaggatggactccttccggtgcttcaggacacagacgatgtgagcgctatcaccgaccgcgtggaggtggagggcattgtgcggcgaacggaggagaccaaggcgcgttcggtgatggagaaggcacggatggacgccatcgggaagacggtgaggcagaccgcggcaaaggccggaaggaagttctggtgggaggcggactctggcaagctcggggaggctgagctaccagaattcgccaaggtgctccgtcggctcagggtcaacctgcaacgccatttggactcgctgtcggcgtctactaggcagctgcagtag

SEQ ID NO: 138 - protein, 223 aa, Zea mays
  ref <308>: DATABASE ACCESSION NUMBER: GRMZM2G110582
MLAPPLIGIEKKNIGLGTWSRGRKLEKQDSRRTTTAMGRPSRGRQRIEIRHIEDGGRLQVTFSKRKSGLQKKASELFLLCGSPVAIVIFSPGKKVFALGTPSVDHVLRRYAPIPGEEEEDGLLPVLQDTDDVSAITDRVEVEGIVRRTEETKARSVMEKARMDAIGKTVRQTAAKAGRKFWWEADSGKLGEAELPEFAKVLRRLRVNLQRHLDSLSASTRQLQ

SEQ ID NO: 139 - DNA, 666 bp, Zea mays
  ref <308>: DATABASE ACCESSION NUMBER: GRMZM2G117961
atggcgcggggcaaggtgcagctgcggcgcatcgagaacccggtgcaccggcaggtgaccttctgcaagcgccgcgccgggctgctcaaaaaggcccgggagctctccgtcctctgcgacgcccacgtcggcatcatcgtcttctccgcgcacggcaagctctacgacctcgccacctccgggaccatggaagagctgatcgagaggtacaggactgccagcagcagagaagcagccgacggctgcggcgacaataacagaatggacgcaaagcaagaaaccatggtgctgcaacaggaaatcaacctgcttcagaaaggcctgaggtacatctatgggaacagaacaaatgaacacatgaatgttgaagaactgaatgctctagagaggtacttggagatatggatgtacaacatccgctctgcaaagatgcagataatgattcaagagatacaagcactgaaaagcaaggaaggcatgctgcaagctgctaacgaagttcttcaggagaagatagtagaacagagtagtttgcttgacgtaggcatggttgtagcggatcaacagaacgggcattttagtacagtcccactggtagaagagatgatcagtaacccgctgactatactgagtggctattctaactgtaggggctattccttctga

SEQ ID NO: 140 - protein, 221 aa, Zea mays
  ref <308>: DATABASE ACCESSION NUMBER: GRMZM2G117961
MARGKVQLRRIENPVHRQVTFCKRRAGLLKKARELSVLCDAHVGIIVFSAHGKLYDLATSGTMEELIERYRTASSREAADGCGDNNRMDAKQETMVLQQEINLLQKGLRYIYGNRTNEHMNVEELNALERYLEIWMYNIRSAKMQIMIQEIQALKSKEGMLQAANEVLQEKIVEQSSLLDVGMVVADQQNGHFSTVPLVEEMISNPLTILSGYSNCRGYSF

SEQ ID NO: 141 - DNA, 1062 bp, Zea mays
  ref <308>: DATABASE ACCESSION NUMBER: GRMZM2G069713
atgcggcagatctcgtcgctgctgcagggcctggcccggtcactctcggtggggagggacagggacagggacagggaccggaaagggaacggcgcaggcgaccgcaagaccgccgtgccggcggtgctgcggacgtcgggcaccctgtggggcgacggctcggacacgttcgccgccgtctgctcgcggcgcggcgagaaaggcatcaaccaggactgctccatcgtctgggagggattcgggtgccaggagggcaccatcttctgcggcatcttcgacggccacggccagtggggccactacgtggccaaggcggtgcgcgactcgctgccgccgtcgctgctgtgccactggcaggaggcgctcgctctcgcgtcactcatcgacgacggcgagaagaagctcggcgactgccagttcgatctctggaaacggtcctacgtggccgcatgcgccgccgtggacgatgagctgcggcgcagccgccgcttggacgcggtccaaagtggctgcaccgcgctatccatcgtcaagcagggggacctcatgatcgtcgccaacgtcggcgactcccgggccgtgttgggcaccacgtccgacgatggcgccattgcggctgtccagctcaccgtcgacctaaagcctaacctgccacaggagaaggagcgcatccggcggtgcaatggtcaagtgtactgcctcgccgatgagcccggggtgcaccgcgtgtggcagcctagccgagagtcgccggggctcgctatgtcgcgcgcgttcggcgactactgcgtcaaggactgcggtgtcatctctacgccggaggtgacgcagaagaggatcagcagcagtgaccaatttatcatcctcgctaccgacggggtatgggacgtgctctccaacgacgaggcggtacatatcgtggcggggacgccggaccgggcgaaggcggccaagcggctggtggagtgcgccgttcgcgcgtggaggcgcaagcggcgcgacatcgccgtcgatgactgctcggcgatctgcctcttcttccacccgccgccgccgtcgtag

SEQ ID NO: 142 - protein, 353 aa, Zea mays
  ref <308>: DATABASE ACCESSION NUMBER: GRMZM2G069713
MRQISSLLQGLARSLSVGRDRDRDRDRKGNGAGDRKTAVPAVLRTSGTLWGDGSDTFAAVCSRRGEKGINQDCSIVWEGFGCQEGTIFCGIFDGHGQWGHYVAKAVRDSLPPSLLCHWQEALALASLIDDGEKKLGDCQFDLWKRSYVAACAAVDDELRRSRRLDAVQSGCTALSIVKQGDLMIVANVGDSRAVLGTTSDDGAIAAVQLTVDLKPNLPQEKERIRRCNGQVYCLADEPGVHRVWQPSRESPGLAMSRAFGDYCVKDCGVISTPEVTQKRISSSDQFIILATDGVWDVLSNDEAVHIVAGTPDRAKAAKRLVECAVRAWRRKRRDIAVDDCSAICLFFHPPPPS

SEQ ID NO: 143 - DNA, 789 bp, Zea mays
  ref <308>: DATABASE ACCESSION NUMBER: GRMZM2G038066
atggactcaggttacaatccccggacggtggaggaggtgttccgggacttcaagggccgtcgtgccgggataatccgcgcgctcaccactgatgcggaggatttcttcaagcaatgcgacccggaaaaagaaaacttgtgcctgtatgggtttcctaatgagagctgggaagtaaatttgcctgctgaagaggtgccacctgacctcccagaaccagcattaggcataaactttgcaagagatggaatgcaggaaaaagagtggttgtccatggttgctgcacacagtgatgcatggttactttctgttgcattttacttcggtgctcgattcggtttcaataaaaatgacaggaagcgcctctacagtttgattgatgatcttcccatggcttttgaaattgttagtgggaagagtgaaaccaaggcaccagcaccaccaagcagtagtaaccacagcaatatcaaaccgaagtctaacaacaaaaagaaaccaccggagcctaaggtgaagcagccaaagccgcgtgcccctgcagaggaaggcgaggaggaagatggcagtgcaagcgagggcgagcacggggagacgctgtgcggcgcgtgcaaggaaagctacggccccgacgagttttggatctgctgcgacctctgcgagaagtggttccacggcaagtgcgtcaagatcacggcggccaaggccgagcacatcaagcagtacaagtgcccgtcctgcaccggcggcggtggcgtcagcaacagcggcaccaagcgagcccgcccatcatag

SEQ ID NO: 144 - protein, 262 aa, Zea mays
  ref <308>: DATABASE ACCESSION NUMBER: GRMZM2G038066
MDSGYNPRTVEEVFRDFKGRRAGIIRALTTDAEDFFKQCDPEKENLCLYGFPNESWEVNLPAEEVPPDLPEPALGINFARDGMQEKEWLSMVAAHSDAWLLSVAFYFGARFGFNKNDRKRLYSLIDDLPMAFEIVSGKSETKAPAPPSSSNHSNIKPKSNNKKKPPEPKVKQPKPRAPAEEGEEEDGSASEGEHGETLCGACKESYGPDEFWICCDLCEKWFHGKCVKITAAKAEHIKQYKCPSCTGGGGVSNSGTKRARPS

SEQ ID NO: 145 - DNA, 393 bp, Zea mays
  ref <308>: DATABASE ACCESSION NUMBER: GRMZM2G126026
atgtacgccgacgccgggttcgccttcgccttcgccgccgcctactcccccaccctcacttcctcgcagccccagccgccgccgccgccgttcgactacgccttctcctccgagccacccctcctctccatgcccgccatggaccacgacgcctacctgaaccttggagccaacacgcctcgaccagcagcaaatgtttgtgtgaccatcagtgacctcaagaccgaagaaaggaagcaaaagctttccaggtataggaagaagaagatcaagcggaactttggcaggaagatcaagtacgcgtgcaggaaggctctggcagacagccagccaagagtgcgagggagatttgccaagatcgaagaatgcgacctgctgaagccaagcaagtag

SEQ ID NO: 146 - protein, 130 aa, Zea mays
  ref <308>: DATABASE ACCESSION NUMBER: GRMZM2G126026
MYADAGFAFAFAAAYSPTLTSSQPQPPPPPFDYAFSSEPPLLSMPAMDHDAYLNLGANTPRPAANVCVTISDLKTEERKQKLSRYRKKKIKRNFGRKIKYACRKALADSQPRVRGRFAKIEECDLLKPSK

SEQ ID NO: 147 - DNA, 276 bp, Zea mays
  ref <308>: DATABASE ACCESSION NUMBER: GRMZM2G134073
atggaggcccggcccggcgcgtggcgcctgcagcagcggggccccggcgcgcccgtcgcgggcctgcccatcggcttccgcttccgccccaccgacgaggagctgctgctgcactacctccgccgcaaggcgctggcctgcccgctcccggcgggcgtcatcccggacgccgacctcgcgcgcctcgacccgtcggacctcctcctccccgccgccgcaccacgtacaccacccatccccacccccacccccgctccatccgcgtcctttacctga

SEQ ID NO: 148 - protein, 91 aa, Zea mays
  ref <308>: DATABASE ACCESSION NUMBER: GRMZM2G134073
MEARPGAWRLQQRGPGAPVAGLPIGFRFRPTDEELLLHYLRRKALACPLPAGVIPDADLARLDPSDLLLPAAAPRTPPIPTPTPAPSASFT

SEQ ID NO: 149 - DNA, 1635 bp, Zea mays
  ref <308>: DATABASE ACCESSION NUMBER: GRMZM2G006493
atggcggacgccgacgccaagtcccagccgcccgacgccgcggcatccccggatgcctcgatctcctccccctcctccctaggcggcggcggcggcgacgcggccgacgcggacgcgatcgagaagcagctcgccggcctgggcatcgccgtcgccggtgggttccccgagccatcgggatgggacgatggccccgtaccagtccccatcccggccgatgtccttgtcggcggtgatgagggtgccggcgagaagccgcgggcgccggcgccggcgccgactggggcggtggatgtgaaggtgcggttcccgcgccggcccggggagccggactgcagctactacctcaagttcggcacctgccgcttcgggatgaagtgcaagttcaaccaccctgcgaggaagaagaagactagtagggtgagaggcgtcgggagcaacggcagcgggagcaacagcagcagcaataaagcatcttctcctgatgatgatcaggctcctaaagaagaatacgaaggtcttgttccggacatttcggattccatgggctttgatgacaaggggagcttatctagttcagaaaatcataggaatatgtcatatgaagttattgatatgaaaagggggaaactagagccaaaggaaaaggtttgtgaagaacctgaaaaggcaattcattttacgaagttagacgagacaaatatcgcaacccaaaagggttctaaagataaaagaaaggaaacctttgcagaaggcaacactcaggaggaatgcaagtattattcaacacctggaggatgcaaattcggtaaaacttgcaaatacctccaccgtgagggaaatggagggaaaacagaggttgaaaaagctgagctaaactttctaggtcttccactgcgaccaggtgaaaaggagtgcccatactatatgcgcactgggagctgcaaatttgcgactaactgcaagtttcaccacccagatcctactaatgcatcttcaaaagaaccagggttggaacatgagaatggcgatgtaccactgcaaaatgtccaaggatcctctcagcctagccttcagatgtggcctgaccagagagcattgaatgaacagcatgttccttttcttgctccagcaccgtcatacagtggagggatggttccacctcaaggaatgtatccatcttctgattggagtgggtatcatcaggtacctttgaatccatattaccctcccggtgttcctttcccgcattttccagctgcccatatgaatcacccgatgtacaaggctgcagatataccaggacatcaaccaccaccatctgatgagtatcccgagagacctggccaacctgaatgccagcatttcgttaagagcggtttctgtaaatacaggatgaaatgcagatatcaccatccaaggtcgcgccagtctgcaccaccaccagcaggtcttagccccatcggcttgcctatcaaacctgatcaacctgtgtgcacttactatggacgctatggcttctgcaagtatgggccagcctgcatgttcaaccaccccttcaacttcgggcctcccgtgccggcagcaggaccacccctccctgggcagtaccctacgcatggaaacttcgcctag

SEQ ID NO: 150 - protein, 544 aa, Zea mays
  ref <308>: DATABASE ACCESSION NUMBER: GRMZM2G006493
MADADAKSQPPDAAASPDASISSPSSLGGGGGDAADADAIEKQLAGLGIAVAGGFPEPSGWDDGPVPVPIPADVLVGGDEGAGEKPRAPAPAPTGAVDVKVRFPRRPGEPDCSYYLKFGTCRFGMKCKFNHPARKKKTSRVRGVGSNGSGSNSSSNKASSPDDDQAPKEEYEGLVPDISDSMGFDDKGSLSSSENHRNMSYEVIDMKRGKLEPKEKVCEEPEKAIHFTKLDETNIATQKGSKDKRKETFAEGNTQEECKYYSTPGGCKFGKTCKYLHREGNGGKTEVEKAELNFLGLPLRPGEKECPYYMRTGSCKFATNCKFHHPDPTNASSKEPGLEHENGDVPLQNVQGSSQPSLQMWPDQRALNEQHVPFLAPAPSYSGGMVPPQGMYPSSDWSGYHQVPLNPYYPPGVPFPHFPAAHMNHPMYKAADIPGHQPPPSDEYPERPGQPECQHFVKSGFCKYRMKCRYHHPRSRQSAPPPAGLSPIGLPIKPDQPVCTYYGRYGFCKYGPACMFNHPFNFGPPVPAAGPPLPGQYPTHGNFA

SEQ ID NO: 151 - DNA, 498 bp, Zea mays
  ref <308>: DATABASE ACCESSION NUMBER: GRMZM2G001577
atgaggatccggaagcgcacccctgccagggcagcgtcgccgggaccgccgcctctgcctcctcctcctcccctaccgctgcagcgtcccacggagaaaccacgggatgaggcggcggcggaggaggaggaggagaagcgggcggtcctcgccgccggagtccgagaaggcgacgaccgggttcgccccgccgccgccgccgctggctctgggaacagcgcaacggacgacgtgccgaggccggagccgcaggagcaggacgccgccaggtgcagccggaacgacgggaagcggtggcgctgcaagaaggcggccgtgccggggtacctgttctgcgaccgccacatcgcgtggtccacacgcaagcgcaagcccagagccagcaccaagcccaaggttcacggcagcggcgtcctggagcccaccgccatcgcccaggagttcgcggaggaccacggccccacgcagcgcgacgccgggttcctcggcggcttctag

SEQ ID NO: 152 - protein, 165 aa, Zea mays
  ref <308>: DATABASE ACCESSION NUMBER: GRMZM2G001577
MRIRKRTPARAASPGPPPLPPPPPLPLQRPTEKPRDEAAAEEEEEKRAVLAAGVREGDDRVRPAAAAAGSGNSATDDVPRPEPQEQDAARCSRNDGKRWRCKKAAVPGYLFCDRHIAWSTRKRKPRASTKPKVHGSGVLEPTAIAQEFAEDHGPTQRDAGFLGGF

SEQ ID NO: 153 - DNA, 840 bp, Zea mays
  ref <308>: DATABASE ACCESSION NUMBER: GRMZM2G055180
atgctgcttaacccggcgtccatgctggacaccatccggcagcacctcctggaggagccaccagcggcggccgacgagagcttcgggatcctggtggcggaccagtggagcgactcgctcccgttccgcaccgacgacgccgacgacatggtggtgttcggggcgctgcaggacgccttcgcctacggctggctgcccgacggctccttcgcgcacgtgaagcccgagccggtgcggtcccccgactcctactactcctcctcctacgacggctcctgcttcggcggcctcccgtacccggagcagccactgacgcccggcagcgagggcgaggcggccgccacgcccagccccaggagggaggaggccgcggcggccgtggccaggggcaagcactacaggggcgtcaggcagcgcccgtggggcaagttcgcggcggagatcagggacccggccaagaacggcgcgcgcgtctggctcggcacctacgacaccgccgaggacgccgcgctcgcctacgaccgcgccgcctaccgcatgcgcggctcgcgcgcgctcctcaacttcccgctccgcatcggctccgagatcgccgccgcggccgccggggacaagcggccgttggcgttgcccgagcccgccacctcctcggactcgtcctcgtcctccaccggcggctcgcccaagaggcggaagcgaggcgaggccgccgccgccaacatggccatggcgctggtgcccccgccttcccagcttagccggccggcccagccatggttccctgccgcgccggtcgagcaggcggcgatgccgccgcgcgtggagcagctcgtcatctag

SEQ ID NO: 154 - protein, 279 aa, Zea mays
  ref <308>: DATABASE ACCESSION NUMBER: GRMZM2G055180
MLLNPASMLDTIRQHLLEEPPAAADESFGILVADQWSDSLPFRTDDADDMVVFGALQDAFAYGWLPDGSFAHVKPEPVRSPDSYYSSSYDGSCFGGLPYPEQPLTPGSEGEAAATPSPRREEAAAAVARGKHYRGVRQRPWGKFAAEIRDPAKNGARVWLGTYDTAEDAALAYDRAAYRMRGSRALLNFPLRIGSEIAAAAAGDKRPLALPEPATSSDSSSSSTGGSPKRRKRGEAAAANMAMALVPPPSQLSRPAQPWFPAAPVEQAAMPPRVEQLVI

SEQ ID NO: 155 - DNA, 786 bp, Zea mays
  ref <308>: DATABASE ACCESSION NUMBER: GRMZM2G141299
atggctaactcggctcttgtctatttctgtgcgagcagccggagatcggtggagaagcgggttgtgtcggtgccgctggccgagtgcggggaccggcccagaggggccagcggggaggggccgccgccgtcggactcgtgggcgtggcgcaagtatgggcagaagcccatcaagggctccccctacccacggggttactaccgctgcagcagctccaaggggtgcccagcgaggaagcaggtggagcgcagccacgcggaccccaccgcgctgctcgtcacctacaccttcgagcacaatcacgaggcgccgcagcccaagaccagcggcggcagctgctgccaccagcaaggcaagccgtccgcgcggccgccggcgccgaagcctgagccgtccgtggtcctggtccagcgggatgagctcggcccggagcacgagctggtagaaacagaggtgccggagcaggagcaggagacggagccagaagaggagcacgagccggcggaagagggcgtcccatgtctggccggtccggaagcggcagcaaccttaacggtggcgccggcggccgaggaggacgaaagcttcgactttgggtggttcgaccagtacccgacgtggcaccggtcggcgctgtacgcccctctgctgccgccggaggagtgggagcgggagctgcagggggaggacgccctgtttgcggggctcggcgagctgcccgagtgcgccgtcgtcttcggccgccgccgcgagctcagcctggccgccaccgcgccgtgctcctga

SEQ ID NO: 156 - protein, 261 aa, Zea mays
  ref <308>: DATABASE ACCESSION NUMBER: GRMZM2G141299
MANSALVYFCASSRRSVEKRVVSVPLAECGDRPRGASGEGPPPSDSWAWRKYGQKPIKGSPYPRGYYRCSSSKGCPARKQVERSHADPTALLVTYTFEHNHEAPQPKTSGGSCCHQQGKPSARPPAPKPEPSVVLVQRDELGPEHELVETEVPEQEQETEPEEEHEPAEEGVPCLAGPEAAATLTVAPAAEEDESFDFGWFDQYPTWHRSALYAPLLPPEEWERELQGEDALFAGLGELPECAVVFGRRRELSLAATAPCS

SEQ ID NO: 157 - DNA, 1080 bp, Zea mays
  ref <308>: DATABASE ACCESSION NUMBER: GRMZM2G171852
atggaggagatgctcatggctggaaacgcaaatctaaaccagaatccaaacccaccgccggctgcgccctcggctcccggcgcccagagggcaggcgctcccgccgcggttgcggcagcgccgcctagcgctggcgcgaccggaggagcggggccggagcggcgggcgcggccgcagaaggagaaggcgctcaactgcccgcggtgcaactccaccaataccaagttctgctattacaacaactatagcctccagcagccgcgctacttctgcaagacgtgccgtcgctactggaccgagggcggctcgctccgcaacgttccggtgggcggcggctccaggaagaacaagcgctcgtcctcggccgtgtcgtcggcggctgcggccgccgccgcctccacctccgcggctatgtctggcacggtccccgtggggctcgcggccaagaaccccaagttgatgcacgagggcgcgcacgacctcaacctggcgttccctcaccacaacggccgcgctctgcagccaccggagttcccggcgttcccgagcctggagagcagcagcgtgtgcaaccccggagctgccatgctgggcaacggcgccgccggcaggggcatgggcgcgctctcgggtttggagctgctgaggagcacgggctgctacgtcccactgcagcactttcagctagggatgcccgcggagtacgcagccgcgggattctcgctgggcgagttccgcgttccgccgccgccgcagtctcagagtgtgttcgggttctccctggacacgcacggcacggggggagttggcggcgccgggggttacagtgccgggctgcaggagagcgcggctggcaggatgctcttccccttcgaggacttgaagccggcagtgagcgctgctggcggcggcgcgagcaacggagctgatcatcatcactacgagcacagcaaagatcaagcagcaggcgacggcggcggagccagcggcgtcaccggcggccacgaggctccagcaggattctggagcaatagcatgatcgggaatggcagcagcaatggtggcggaggctcttggtaa

SEQ ID NO: 158 - protein, 359 aa, Zea mays
  ref <308>: DATABASE ACCESSION NUMBER: GRMZM2G171852
MEEMLMAGNANLNQNPNPPPAAPSAPGAQRAGAPAAVAAAPPSAGATGGAGPERRARPQKEKALNCPRCNSTNTKFCYYNNYSLQQPRYFCKTCRRYWTEGGSLRNVPVGGGSRKNKRSSSAVSSAAAAAAASTSAAMSGTVPVGLAAKNPKLMHEGAHDLNLAFPHHNGRALQPPEFPAFPSLESSSVCNPGAAMLGNGAAGRGMGALSGLELLRSTGCYVPLQHFQLGMPAEYAAAGFSLGEFRVPPPPQSQSVFGFSLDTHGTGGVGGAGGYSAGLQESAAGRMLFPFEDLKPAVSAAGGGASNGADHHHYEHSKDQAAGDGGGASGVTGGHEAPAGFWSNSMIGNGSSNGGGGSW

SEQ ID NO: 159 - DNA, 3606 bp, Zea mays
  ref <308>: DATABASE ACCESSION NUMBER: GRMZM2G158252
atggttccgaacggagcaggggaatgcggcggcggctgccggcgagggaaagcagcgcacgccggtgtcggcgctgtggctggtttcttcttatgtctcttgatggtctgggcagttggtgggtctgaaagatcaggttgtggccgggtggctgagcaccacggggtggtacgggtggggcagttcaacctcagcaggagccagctgcaggcgttggtgttcctcctctcatcgacacataaagaatgtatggtaaattctggaatggtccatgatgggaatcaagtcaatggtgcgtcttttatcccagatattcgttgcattcgagataggatatatgatggaaaacagaattggttgaaggatgcaattcttcaagaatcttgcacagcacaagataaatatggcctaaatagtcatgcacctgcagtattggaagataagttattgcaaaatgttatacaagaagacattaattctaccacgcagtgcaatccggacgaatgtgacttatgtgctggaatcagtggcgtgaatgtggtccagaatattgggtcaagttctaatcgcacaataatattatgtctatctgcttttttggggagcattgtgatatcaatagttaaaactacgcacaaaagagggattcaaacccacaagctttatgcagatgagaaagttctccaggcaccaagtactaaaataagtcgaaagtggtcaaagagagccctgcttattggtgtcttatttgggctctgtagctctgtatgcatattttcatgcatgtatgccgatgttgttgctcggagaattgagaatcttgctaatatgtgtgatgagagagcaaggatgttacaggatcagtttaatgtaagcatgaaccatgtgcatgcgttggctatactggtctcatcatttcaccatgggaaggatccttctgctattgatcagaaaacatttgaggacttcacagcaaggacaacatttgaaaggccattgatgagtggtgtcgcctatgcattgaaggtattacacaatgaaagacaacagtttgaggaacaacatggatggaagattaagaagatggaagatggagatcagtcccttgttcatgactacaaccttgaaaagcttgaaccatcaccagttcaagatgagtatgcgcctgttattttctctcaggaaactgtgaagcacattatatctgtagatatgatgtctgggaaggaagatcatgacaatatattacgttcctggtcaacaggtaaaggggccctaacatccccttttaagcttctgaagtccaaccatctcggtgtggtgcttacattcactgtatataaatatgatctgcctccaaatgcaacaccacaggagcgtattcatgctacattgggctatcttggtgcctcatttgatgtcccttctctggttgataaactcctagaacaactcgctagcaaacgaaagatagtagttaatttatatgacaccacaaatcatacctctcctattgaaatgtatggttctgattttactccatctggtgatctgcatattagtagcattgattttggagacccaacacgcaaacatgagatgcattgcagatttaaacatgaaccttcactgccatggtctgcaataataatatcaacagctgtagctataattgttttgcttgttggacatattatttatgcaactctgaactcccttgaaaaggctgaacatgattatagagtaatgagagaacttaaaggacaagctgaagctgcagatatagcaaaatctcagtttctagcaactgtttcccatgagattcggactccaatgaatggtgttttaggtatgctgcagatgctaatggacactgaacttgatacaactcagcaggattttgtagtcaccgctcaagaaagtggaaaggtattaataaacttaataaatgaagtccttgatctggctaagatagagtcaggaaggattgagctggaagcagtgccttttgatgtccgtgatattcttgacaatgtgatatctcttttctacgataaatcacaagctaaaggcatagagttggccgtgcttgtatctgaccaagttcctgatgtcctaattggggatccatggcggttccggcagatcattacgaaccttgtggggaattctatgaagtttactgaacagggccacatctttgttcaagtccatttggtcaaggaactaaacaggaaaggaaacaatttttgtgatgtttctgctcataacagagaaattctgtatgattctgacaactcgatgctatggaacacactaagcggacttgaagtagcagatagctggaggtccttggagaattttacgatgttcaagaattcaaatggtgaaacagatacaattaggttagctgtcagagttgaagacaccggcataggaataacaaaagatgctcaaatgcgtatttttacacctttcatgcaagctgacagttccacctcacgaacatatggtggaactggaattggcttgagtattacaaaacgtttagttgaattgatgggtggagaaatagggtttactagtaaatcaggagttggtagtacattttcttttactgccattttcaaggagaacagaggatgtcctggagatatgaaaagatactattctgaacctactccgttggattttcaaggaatgagggctcttattattgatggaaggagtgcacgtgcagaggttactatgtaccatcttcgtagacttggaatacagtgcagtcttgttgccacatctgaatctgaatctgcatcttcagctttgatgaaagcctgcacctcaagcaaaaacaatccggacatggtccttgttgatacagaagcttggggtaaaggttcaggtttggcattctatcatcgttttgtagattgtcaactaaagggcgcacacaagttttctcagcccatgccaaagactattcttttgggaagctcaataagccctgttgaatctgattatttaagattgacaggatttggtgattgcataaggaaacccctccgtcttagtactattgttgcctgtcttcgcaaaaccttaggggttggggttacaaggcagcagagtagagaccaatctttggttcttcaaagtgtactaactggaaaacagattctggttgtggatgataatgcagtcaaccgtaaagttgcagctggttctttgaagaaatatggatctaaagttacatgtgttgatagtgggagtgatgcaattgatatgctcaagccacctcacacatttgatgcttgcttcatggatgttcagatgcccgagatggacgggtttgaagctacaagattaatccggtccatagagaaaaaaataaacgatatgatcatgatgggtgaaatatccgctaataattatggaaataaggcccattggcatgtaccaatattagctatgacggcagatgtaatccaagcgacttttgaaaaatgtatgcagtgtggaatggatggatatgtgtcaaagccatttgaagaacagcagctctactttgctgttgctcatttcttagagactgatgaaacagaataa

SEQ ID NO: 160 - protein, 1201 aa, Zea mays
  ref <308>: DATABASE ACCESSION NUMBER: GRMZM2G158252
MVPNGAGECGGGCRRGKAAHAGVGAVAGFFLCLLMVWAVGGSERSGCGRVAEHHGVVRVGQFNLSRSQLQALVFLLSSTHKECMVNSGMVHDGNQVNGASFIPDIRCIRDRIYDGKQNWLKDAILQESCTAQDKYGLNSHAPAVLEDKLLQNVIQEDINSTTQCNPDECDLCAGISGVNVVQNIGSSSNRTIILCLSAFLGSIVISIVKTTHKRGIQTHKLYADEKVLQAPSTKISRKWSKRALLIGVLFGLCSSVCIFSCMYADVVARRIENLANMCDERARMLQDQFNVSMNHVHALAILVSSFHHGKDPSAIDQKTFEDFTARTTFERPLMSGVAYALKVLHNERQQFEEQHGWKIKKMEDGDQSLVHDYNLEKLEPSPVQDEYAPVIFSQETVKHIISVDMMSGKEDHDNILRSWSTGKGALTSPFKLLKSNHLGVVLTFTVYKYDLPPNATPQERIHATLGYLGASFDVPSLVDKLLEQLASKRKIVVNLYDTTNHTSPIEMYGSDFTPSGDLHISSIDFGDPTRKHEMHCRFKHEPSLPWSAIIISTAVAIIVLLVGHIIYATLNSLEKAEHDYRVMRELKGQAEAADIAKSQFLATVSHEIRTPMNGVLGMLQMLMDTELDTTQQDFVVTAQESGKVLINLINEVLDLAKIESGRIELEAVPFDVRDILDNVISLFYDKSQAKGIELAVLVSDQVPDVLIGDPWRFRQIITNLVGNSMKFTEQGHIFVQVHLVKELNRKGNNFCDVSAHNREILYDSDNSMLWNTLSGLEVADSWRSLENFTMFKNSNGETDTIRLAVRVEDTGIGITKDAQMRIFTPFMQADSSTSRTYGGTGIGLSITKRLVELMGGEIGFTSKSGVGSTFSFTAIFKENRGCPGDMKRYYSEPTPLDFQGMRALIIDGRSARAEVTMYHLRRLGIQCSLVATSESESASSALMKACTSSKNNPDMVLVDTEAWGKGSGLAFYHRFVDCQLKGAHKFSQPMPKTILLGSSISPVESDYLRLTGFGDCIRKPLRLSTIVACLRKTLGVGVTRQQSRDQSLVLQSVLTGKQILVVDDNAVNRKVAAGSLKKYGSKVTCVDSGSDAIDMLKPPHTFDACFMDVQMPEMDGFEATRLIRSIEKKINDMIMMGEISANNYGNKAHWHVPILAMTADVIQATFEKCMQCGMDGYVSKPFEEQQLYFAVAHFLETDETE

SEQ ID NO: 161 - DNA, 933 bp, Zea mays
  ref <308>: DATABASE ACCESSION NUMBER: GRMZM2G073427
atggcgggtggcggcgccggcgacgacgacgtggtggtggtgagctgcggcggcagaggcggcggcgaccccggcgcatacgccgcggtgctcaagaggaagctcgacctgtactgcgccgccgtcgccaaatccatggaagctaaatcacaagaacattcgttgggctaccccaactcacaagcttcagatgcttcgcaattgatttctcaagcttcctttgatggtgacatagatggggcaagcctagttacaaactctaatgtcatagaagatgatgattttcaaggcaagccaaccaacagtggcacatcaaaggaactgtcagacgatgatggtgaccttgaagagaatactgaccccgctaacgccaagaagatgaggagaatggtgtcaaaccgggaatcggctaggcgatcaagaaagaggaagcaagcacacttgaccgatcttgaatcacaggtttccaggttaacgtctgagaatgcatctttgctgaagcgactggctgatatgactcagaaatacaaggacgcttccgttgacaataaaaatctaacagttgatgttgagactatgaggagaaaggtgaacatagccgaggaagctgtcaggaggctaactgggatcaccctcatgctaccgaccgcttttgagaagcccacgagcagcgcgcccctgtcatcatgtccatctgatgcagcttctgcttctgcttctgccgccattgaagacagcgtgaagcatttcctccaggcgccacttgaaaacagtgggatcatcccaaacgcagcagtttttcagaccaagccagcttctctgcaccgtgttgctagcctggagaacctgcagaagaggatcgtcggggatgcaatgtattccgagaccgcgtcaacgacattctcagatcctgaagctcttgccgataggtaa

SEQ ID NO: 162 - protein, 310 aa, Zea mays
  ref <308>: DATABASE ACCESSION NUMBER: GRMZM2G073427
MAGGGAGDDDVVVVSCGGRGGGDPGAYAAVLKRKLDLYCAAVAKSMEAKSQEHSLGYPNSQASDASQLISQASFDGDIDGASLVTNSNVIEDDDFQGKPTNSGTSKELSDDDGDLEENTDPANAKKMRRMVSNRESARRSRKRKQAHLTDLESQVSRLTSENASLLKRLADMTQKYKDASVDNKNLTVDVETMRRKVNIAEEAVRRLTGITLMLPTAFEKPTSSAPLSSCPSDAASASASAAIEDSVKHFLQAPLENSGIIPNAAVFQTKPASLHRVASLENLQKRIVGDAMYSETASTTFSDPEALADR

SEQ ID NO: 163 - DNA, 1938 bp, Zea mays
  ref <308>: DATABASE ACCESSION NUMBER: GRMZM2G079470
atgaggggaatgctctttgctggtagcgcacgagaagggcacgcggggacactgctgcaactgcaactgcaacaccaacgacaggggctcgccgccggcaaagtctcaggcgccggcgacctctgggagcccacctcggtgcttgaccgccgacacagccccagcccgagcccgccgacctcggttcccacgctgtcgtcgcccctgggcgccgcgaccgccggtgtggcggccctcgccggtgctaacgccaagaacgtctccccgccgccggtggcggcggcggcatggccagggggaggaggggcggaggaggccgtggcggggggcaaggaggagtggcagctcacaccgcttgacatgggccttggcgccggcgaggggtgggacgcggccgacgccgcggcgccgccggggctcgcccccgaccacaccttcctcaggtggatcatcggcggcgaggacgcgtctgcggccatggggtctgtcatggacccgccggtccttgagctggaccacgcgccgtccatgatgtcgccggcgtttgggtccaccatgccgttcgcgccggccatggaggacgccaagccggtgcccttcggccacacgcccaacttcctgctccaccactgccaccagcaccacccccagccgcacgccgccttcttcggctcgcacccgtccctggacgcggcgccgcagccgaagcgaccacacccgatggccggggcgccggcgccgaagctgccgtctttccctgggcctgtcgcccaggcgggcggcgggttcgcgtcggccttgaagcccaaggcggaggcgggtaacgacgaggcggccgctgcggtggaccagcttgccgaggcggccagacttgccgaggccggcgacgccttcggcgcccgcgagatattggcgcggctcaattatcggctccccgccgtgcccacggccgggacgccgctgctccgctcggccttctacttcaaggaggccctgcgcgttgcgctctccccgaccggcgaggcccttgcgcccccggcggtgtcgacgccgtacgacgtggtcctgaagctcggcgcgtacaaggccttctccgaggtgtcccccgtgctccagttcgcgcacctgacctgcgtgcaggcggtgctggacgagctcggggccgccgggcgcatccacgtgctggacctggacatcggcatgggcgagcagtgggcgtcgctgatgcaggagctggcgcagcgcagccccgcggcgacgctcaaggtgaccgcattggtgtcgccggcgtcgcaccacccgctggagctgaacctcatccacgagaacctgtcgggcttcgcccgcgagctcggcgtgttcctccagttcgcggcgtacaacgtggacgccctggaccccgcggagctggtggccatcaccagcggcgacgccgtggccgtccacctccccgtggggtcggcccacgtggccgcaatgccggccgtgctccgcctcgtgaagcggctcggcgccaaggtggtggtgtccgtggaccgcggctgcgaccgcacggagctgtcgttcagcacgcacctgttacaggcgttccagtcctgcgtgtccctgctggactccatcgacgccgtggggggcgcggacgccgaggcggtcggcaggatcgagcgcttcatggtccagcccgacgtggagcggcgcgtagtgtcgcgccaccgcgcggcagtggccgtggacaagccgccgccgctgccgtggcggaccgtgctcgcgtcggcggggttcgtgccggtgcaggccagcacgttcgccgagtcgcaggccgaggccctactcaagcggatggcgctgatggggttccgcgtcgagaagcgcggcggcgcgctctgcctctactggcagcgcggcgagctggtctccgtgtcggcgtggcggtgctga

SEQ ID NO: 164 - protein, 645 aa, Zea mays
  ref <308>: DATABASE ACCESSION NUMBER: GRMZM2G079470
MRGMLFAGSAREGHAGTLLQLQLQHQRQGLAAGKVSGAGDLWEPTSVLDRRHSPSPSPPTSVPTLSSPLGAATAGVAALAGANAKNVSPPPVAAAAWPGGGGAEEAVAGGKEEWQLTPLDMGLGAGEGWDAADAAAPPGLAPDHTFLRWIIGGEDASAAMGSVMDPPVLELDHAPSMMSPAFGSTMPFAPAMEDAKPVPFGHTPNFLLHHCHQHHPQPHAAFFGSHPSLDAAPQPKRPHPMAGAPAPKLPSFPGPVAQAGGGFASALKPKAEAGNDEAAAAVDQLAEAARLAEAGDAFGAREILARLNYRLPAVPTAGTPLLRSAFYFKEALRVALSPTGEALAPPAVSTPYDVVLKLGAYKAFSEVSPVLQFAHLTCVQAVLDELGAAGRIHVLDLDIGMGEQWASLMQELAQRSPAATLKVTALVSPASHHPLELNLIHENLSGFARELGVFLQFAAYNVDALDPAELVAITSGDAVAVHLPVGSAHVAAMPAVLRLVKRLGAKVVVSVDRGCDRTELSFSTHLLQAFQSCVSLLDSIDAVGGADAEAVGRIERFMVQPDVERRVVSRHRAAVAVDKPPPLPWRTVLASAGFVPVQASTFAESQAEALLKRMALMGFRVEKRGGALCLYWQRGELVSVSAWRC

SEQ ID NO: 165 - DNA, 1680 bp, Zea mays
  ref <308>: DATABASE ACCESSION NUMBER: GRMZM2G139688
atgtaccgggtgaagagcgagggggagggcgagggcgagggcgactgcgaaatgatgctgcaggaacagatggactcgctggtggccgacgacgtcagcagcggaggagggtcgcctcacaggggcgtcggcacgcccctgaagaaggggccatggacgtccgcggaggacgccatcctggtggactacgttaagaagaacggcgagggcaactggaacgcggtgcagaagaacaccgggctgttccgctgcggcaagagctgccgcctccggtgggcgaaccacctcaggcccaacctcaagaagggggccttcacccccgaggaggagcgcctcatcatccagctccacgccaagatggggaacaagtgggcgaggatggctggtcacttgccagggcgtactgacaatgagatcaagaactactggaacactcgaataaagagatgtcaacgagctagccttcctatttatcctgctagtgtatgcaatcaatctacaaatgaagatcagcaactgtctggtaattttaacggtggcgagaatatatccaatgatcttctatctgggaacagcctttatctgccagattttaccagtgacaatttcattgcgaacccagaggctttatcctatgcaccacagttgtcagctgtttcaataagcaatttgctcggccaaagctttgcatcaaaaagttgtagcttcatggatcaggttgaccaagcggggatgctgaaacaatctggctgtgtgcttcctgcattgagcgatgccattgacagtgtgctttcctcagctgatcatttttcaaatgactctgagaagctcaggcaggctttaggttttgattatctgaatgaagccaatgctagcagcaagagtattgcacctttcggggttgcacttactggcagccatgcctttttaaatggcaatttctctgcttctaggcccacaaatggtcctttgaagatggagctcccttcactccaagatactgaatctgatccaaatagctggctcaagtatactgtggctcctgcaatgcagcctactgaattagtagatccttacctgcagtctccatcagcgaccccttcagtgaaatctgagtgtgcatcgccgaggaacagtggtcttttggaagagctgcttcatgaagctcaggcactaagatctgggaagaaccaacaatcatcggtccgaagttcaagttcttctgctggcacaccttatgagactaccacggtggttagcccagagtttgatatgggtcaggaatattgggaagaacagcccagttctttcctcagtgaatatgctcattttagtggaaattctttcactgaatccactcctcctgttagtgctgcgtcacctgatatcttccagctctccaagatttctcctgcacaaagcccttcaatgggctctggcgagcaggcgttagagcctaaacatgagtcggcagcttcacctcgtcctgaaaacttgaggcctgatgcattattctctgggaacacagccgatccatccattttcaataatgccatagccatgctcctgggcaatggcattgatgccgagtacaaacctgttcttggtgatggaattgtgctcgattcttcgtcatggaacaacatgcaacatgcttttcagatggcgggattcaaatga

SEQ ID NO: 166 - protein, 559 aa, Zea mays
  ref <308>: DATABASE ACCESSION NUMBER: GRMZM2G139688
MYRVKSEGEGEGEGDCEMMLQEQMDSLVADDVSSGGGSPHRGVGTPLKKGPWTSAEDAILVDYVKKNGEGNWNAVQKNTGLFRCGKSCRLRWANHLRPNLKKGAFTPEEERLIIQLHAKMGNKWARMAGHLPGRTDNEIKNYWNTRIKRCQRASLPIYPASVCNQSTNEDQQLSGNFNGGENISNDLLSGNSLYLPDFTSDNFIANPEALSYAPQLSAVSISNLLGQSFASKSCSFMDQVDQAGMLKQSGCVLPALSDAIDSVLSSADHFSNDSEKLRQALGFDYLNEANASSKSIAPFGVALTGSHAFLNGNFSASRPTNGPLKMELPSLQDTESDPNSWLKYTVAPAMQPTELVDPYLQSPSATPSVKSECASPRNSGLLEELLHEAQALRSGKNQQSSVRSSSSSAGTPYETTTVVSPEFDMGQEYWEEQPSSFLSEYAHFSGNSFTESTPPVSAASPDIFQLSKISPAQSPSMGSGEQALEPKHESAASPRPENLRPDALFSGNTADPSIFNNAIAMLLGNGIDAEYKPVLGDGIVLDSSSWNNMQHAFQMAGFK

SEQ ID NO: 167 - DNA, 1443 bp, Zea mays
  ref <308>: DATABASE ACCESSION NUMBER: GRMZM2G421899
atgagcgacccgcggggccgcgccgccggtcccgaccgctacggggacgaaccgcacgacctcccgctcgccgaggacgcaaacggcgaggaagcgtggcagacgcccgagaaagaggcggttgccgtgtcggaaggggccgctgcgcggagtggggatacgaccccggacgctgaacaggagagcgatgacggagaggaaggagtgggctccccggatcaggcggaacccaatgcgagcggggagggcgtaccgcccgtggccgcgactgtggagccggatgggattgttagcggcgcaaaggtggagacgaacagcgaggacgccatcagccatgacgccgacgaggaggagaaggacgacgacgatgactccacccaggatgcgtctccgatagccgaggtgaatgtggagggcgagagtggcgccgttcaccgcttggaggtggaaccggacccctttctcgatggagatgcctctgggacggaggaggagcaagccgcgttcatggtggagctggagcgcttccataaggagcacagtctcgagttcaagccgcccaagttctatggcaagggcctcaactgcctcaagttatggaggcaggtcgcccacctgggaggccacgagcaggtaacggtttgtaaactatggcgtcaagttggagagactttcaggccgccaaagacctgcacgactgtttcttggtcatttcgaattttctatgagaaggcacttcttgaatacgaaaaacacaaagtccggactggtcagcttcagataccaccgcctggtttaccacagcctagtggtgctgaccgtgaggtagttgtaaatcaatcatcttctgccagagttagaagggatgttgcagcacgtgctatgcagggttggcatgctcaccgcctccttgccaatggcacttatggggataacattttgaaggacaaagattcaatgccatcttcaagtcgtgataacctaaaaagctttgatgaagaaatacaaaatcttgtagcaccttgtagtgcaattgaactcatctggaggaagttttgtccatatatccggatgatgtatgaaagtttctctggtgtgatgattcctgttctcatatgtaatggaatgcgcaatttcagggaagattctatggtcattgacgttggagaaccagccgactgggtgaagatcaatgtgcggcagactaaagattgctttgaagtctatgcactagttcctggacttctacgtgaggaggtgcatgttcaatcagatcctgctggacgtctggttatcacaggggatccagagcagcctgataatccttgggagatcactccgttcaagaaggtggtggtcaacttgccatcaagaatcaatcctcaccaaacatccgctgttgtcacgcttcatgggtttatgtcagttctgttgaggaaatag

SEQ ID NO: 168 - protein, 480 aa, Zea mays
  ref <308>: DATABASE ACCESSION NUMBER: GRMZM2G421899
MSDPRGRAAGPDRYGDEPHDLPLAEDANGEEAWQTPEKEAVAVSEGAAARSGDTTPDAEQESDDGEEGVGSPDQAEPNASGEGVPPVAATVEPDGIVSGAKVETNSEDAISHDADEEEKDDDDDSTQDASPIAEVNVEGESGAVHRLEVEPDPFLDGDASGTEEEQAAFMVELERFHKEHSLEFKPPKFYGKGLNCLKLWRQVAHLGGHEQVTVCKLWRQVGETFRPPKTCTTVSWSFRIFYEKALLEYEKHKVRTGQLQIPPPGLPQPSGADREVVVNQSSSARVRRDVAARAMQGWHAHRLLANGTYGDNILKDKDSMPSSSRDNLKSFDEEIQNLVAPCSAIELIWRKFCPYIRMMYESFSGVMIPVLICNGMRNFREDSMVIDVGEPADWVKINVRQTKDCFEVYALVPGLLREEVHVQSDPAGRLVITGDPEQPDNPWEITPFKKVVVNLPSRINPHQTSAVVTLHGFMSVLLRK

SEQ ID NO: 169 - DNA, 1968 bp, Zea mays
  ref <308>: DATABASE ACCESSION NUMBER: GRMZM2G169000
atgggcagcggcgcgtcgcggctgctcaccgcgtgcgcgtgctcgcggccgccgccggcgccagcggacgacgggccgtgcctggacgacgcgctcggccactccttctgctacgccgccagctccgccgccgccgccgccgcgggccattcgtcatccttccgccacgccatctccggcgccgcgctctccgccaactcctcagtgcccgtgccgatctaccaatcctccgtcgccggcggcatgccgccgcagtaccactccgcgttccacacttcctcgtcgttctcctccgcgccgctgcagctatccaacctctcctcggggccgctcttcctctccgggcccatcgaccgcggcgcccagctctccggcccgctcgaccaggccgtgcccttctcgggcccgctccccgcgaagcccaccaagcccgctcgcccctcgtcgtcgcgagggttctcgaggaggttcaggaaaccctcgttcggcagcctgcggcggagcatctcggagaagaaccgaccatgcgtcgtgccgctccgccgggaggacggcgttcagtgggcgcacggccgcgccggggaggacagggtccacgtggttgtctccgaggatcagcgctggcttttcgtcggcatctatgacggcttcaacggccccgaggccccggacttcctggtcgctaatctctaccgcttcctgctgcgcgagctccgtgggatcttctacaaagaggccgatccggaatccaagcgactgtggcagttcctggcggatggcgaggacgaggatagcgaactcgacttctcgggctccggccggttcgcgctatcgcttgccaggctcaaggagcagaggcatcccttgtgggcccatgcggccgccgctggcgatggtcaaagcggcagggagtggggagttaagaggttgacggccgcaccggcggtgagggatcacagggcggtactgagcgcactggcccgggcgctagctacgacggagtcggcgtacctggacatgaccagtcagtcaatgggatcccacccagagctggcagtgaccggagcttgcctgctcgtggtcctgttgagggatgacgacgtgtatgtaatgaaccttggggatagccgtgccattgtggcgcagcgacgggacgacgaagattgcttgattgggagcattccggtggaggacattggtgtgggcttggagatcgagacaaggatccctgggtattcggcaattgggctcgaggcattgcagctgtcgactgatcatagcacgagcgttgaagagtatgtggactggcctgttcaacagcatggttttacaatcggcagaccatttttcttttggagttatgaatttatatatcgtgggatagaagtgcagaggatcagacgcgaacatccagatgatgatcagtgtgttgttaatgatagagtgaaaggtcgtctaacagttacccgtgcatttggtgctgggtatctcaaacaggcaaggttcaatgatgggttgctagagatgtttcgcaatgagtatataggtgataccccatatatatcatgcacacctactctttgccatcataagctctccatcagggatcagtttcttgttctttcgtctgatggcttatatcagtacctaagcaatgaggaggtagtgctgcatgttgagaattttatggagcggtttcctgagggtgatcctgcacagagtttaattgaggagctactctcccgtgctgcaaagaaagctgtctctagatcaattagtggttcttcaagatttctcttccatgagcaatactccactactaacctggagtctgccttttcaggcatggacttctatgaactattagatatacctcaaggggaccgcagaaaataccatgatgacgtcaccattatggttatttctcttgaggggagaatatggaaatcctctggaacatatgtgtga

SEQ ID NO: 170 - protein, 655 aa, Zea mays
  ref <308>: DATABASE ACCESSION NUMBER: GRMZM2G169000
MGSGASRLLTACACSRPPPAPADDGPCLDDALGHSFCYAASSAAAAAAGHSSSFRHAISGAALSANSSVPVPIYQSSVAGGMPPQYHSAFHTSSSFSSAPLQLSNLSSGPLFLSGPIDRGAQLSGPLDQAVPFSGPLPAKPTKPARPSSSRGFSRRFRKPSFGSLRRSISEKNRPCVVPLRREDGVQWAHGRAGEDRVHVVVSEDQRWLFVGIYDGFNGPEAPDFLVANLYRFLLRELRGIFYKEADPESKRLWQFLADGEDEDSELDFSGSGRFALSLARLKEQRHPLWAHAAAAGDGQSGREWGVKRLTAAPAVRDHRAVLSALARALATTESAYLDMTSQSMGSHPELAVTGACLLVVLLRDDDVYVMNLGDSRAIVAQRRDDEDCLIGSIPVEDIGVGLEIETRIPGYSAIGLEALQLSTDHSTSVEEYVDWPVQQHGFTIGRPFFFWSYEFIYRGIEVQRIRREHPDDDQCVVNDRVKGRLTVTRAFGAGYLKQARFNDGLLEMFRNEYIGDTPYISCTPTLCHHKLSIRDQFLVLSSDGLYQYLSNEEVVLHVENFMERFPEGDPAQSLIEELLSRAAKKAVSRSISGSSRFLFHEQYSTTNLESAFSGMDFYELLDIPQGDRRKYHDDVTIMVISLEGRIWKSSGTYV

SEQ ID NO: 171 - DNA, 1527 bp, Zea mays
  ref <308>: DATABASE ACCESSION NUMBER: GRMZM2G059851
atgcaccgcgcccgccccaccgcgcacgctaatgaccccgatgctccgtacgccgccgccgtcgcgatgctgctggagcccaaactcgaggacgaggagttgccgctgcagcagctggcgtccccgggccccttcgtgtccctggaccagctgatgccggcggtggccgtgccggccgaaccgcgcccgctggaggcgctgctgcaaggcccgcagctgccgcccttcctgtccaagacgtacgacctggtgaacgagccggcgctggacggggtcatctcctggggcgctgccgggaacagcttcgtcgtgtgggacccctccaccttcgcgcgcgacgtgctgccgcacaacttcaagcacaacaatttctccagcttcgtcaggcagctcaacacctatggtttccgcaaggttcatgctgacagatgggagtttgctcacgaagatttcctgcgagatagcaagcatctattgaagaggattgtcaggcgcaggtcctccccaacaaaacaaagcagcgttcagcctggctcttcttctggagagtccagcttggaccctgagctccacacgctgaggagagagaagaacgcgctgcttgaagaagtagcaaggttgaaacaggaacaccgccagacaattgagcaaatgagcacgctgaatcacaggctggaatctgcagaggaccggcagaggcagatggtctctttcctggccaagctccttcagaacccgagtttcgtgaggaagctgaagctgcacagggagaagaaggagatcgactccaccagggtgaaaagaaagtttctcaaacatgttcctcatggcagcgtagagtcaggtgaatccagctcacagcacgccggagagaatggttcgtatttcgctgtgagttcccccatggctacaactacaagcgtgcatgacgacatcacggagcttcagaactttcttttggaagatgatgacctcaacttcggcatggattcagaaaacaccgggcttgaaggcaccgaggcaacagatgatattggagaactgattcaggggttcgacacacaagaggaacttgacctcggcagtggagctgagctacaggagatgcctccagcttctggccctcttgctcgagatcccacaatcggcaggttcaagggaaagaatgtgctgtgtccaggactggacgctacctcctccgaaggcgactgcctcagtccattgcctgacaacatggggctgctttcaggcaccatgctagggacggcaggcagcatgatggccgctgacgatgagcaaatatggggcgttgatgcttcggcagccctgcaaagctcttgcagtggcactagccaacaagctttcggtagccatgctagtgatccctatctgatggacatcgccaacaggcctgagagattctgggagcttgatttccaggcactggatgaggctgatctgcagctggacaagtgtgctatcgatgaccctgctcttcagcagcagccaagcatgaagaagctgtag

SEQ ID NO: 172 - protein, 508 aa, Zea mays
  ref <308>: DATABASE ACCESSION NUMBER: GRMZM2G059851
MHRARPTAHANDPDAPYAAAVAMLLEPKLEDEELPLQQLASPGPFVSLDQLMPAVAVPAEPRPLEALLQGPQLPPFLSKTYDLVNEPALDGVISWGAAGNSFVVWDPSTFARDVLPHNFKHNNFSSFVRQLNTYGFRKVHADRWEFAHEDFLRDSKHLLKRIVRRRSSPTKQSSVQPGSSSGESSLDPELHTLRREKNALLEEVARLKQEHRQTIEQMSTLNHRLESAEDRQRQMVSFLAKLLQNPSFVRKLKLHREKKEIDSTRVKRKFLKHVPHGSVESGESSSQHAGENGSYFAVSSPMATTTSVHDDITELQNFLLEDDDLNFGMDSENTGLEGTEATDDIGELIQGFDTQEELDLGSGAELQEMPPASGPLARDPTIGRFKGKNVLCPGLDATSSEGDCLSPLPDNMGLLSGTMLGTAGSMMAADDEQIWGVDASAALQSSCSGTSQQAFGSHASDPYLMDIANRPERFWELDFQALDEADLQLDKCAIDDPALQQQPSMKKL

SEQ ID NO: 173 - DNA, 1863 bp, Zea mays
  ref <308>: DATABASE ACCESSION NUMBER: GRMZM2G159161
atggcggcgccagcgaccagggtgatcggatccaagccagcggactgcttccagttccaagaccctaacacctggacctgcgtatcggagctcgcaagcgatgtggtcgtcgaagtaggagatacgtccttccacctacacaagattccgttgaccagccgtagcggcacgctgcagaagcttgtgaacgagtccaccggcgatggcagcaaaccgtgcaccgtgcgtctggacgacgtccccggcggggcggaggccttcctgctggccgccaggttctgctacgacgtccagacggagctgaacgcgggcaacgccgtgccgctgcggtgcgcggcggagcgcctcgccatgacggaggactacggcgaagggaacctcgtggagcaggcggagtcgttcctgtccgaggtgctggccggctggagcgacacggtgcgcgcgttgggcacgtgcgacgacgccgtgctccctgccgccgaggacctgctcatcgtgcagcggtgcatcgactcgctggcggacaaggcgtgcgccgacccgacgctctccgggtggccgatgctggagtacttcacggccaagagcctcgaggagacggcgatctggaccggcatcggcgccgccgggaggccgcggtcgcccggcgcgggctggtggtacgaccaggcgtcctcgttaccgctgccgctctacaagcggctcattgcggcggtgcggtccaggggcatgagccccgagaacgtcgccggctcgctgatgcactacgccaggcgccacctctccgggctcaggcgcctcggagacaacagcgacggcagcagccgcgggggggctgcggccgtgctctcgggcggcgaccagaggacactactggaggagattgtcgcgatgctcccagtcgagaagggcgtcgcaccgacgcggttcctgctcggtctgctccgcgtcgcgacggtcctgcacgccgccgcggcatgccgggacgcgctggagaggagggccggcgaccagctggaggaggccgcgctggaggacctgctgatacccaacaccggatactccgcggagacgctctacgacgtggacagcgtgcagcggatgctggagcagttcatgatgacaaccccgcctgcgttcgccgtgttaccggagaccacggacgagggacagctggtcgacgctccgccgggcgagctcatgccagtcagctcggtaggcaagctagtcgacgggtacctcgcggaggtcgggacggacgccaacctcaagccgtccaagttccagaccatcgcggcgctcgtcccagactacgcccgggcgatcgacgacggcctctaccgcgccattgatatctacctcaaggcgcacccgtggctgacggactcggagcgggagcagctgtgccggctgatgaactgccagaagttgtcgctcgaggcgtgcacgcacgcggcgcagaacgagcggctgccgctgcgggtggtggtacaggtgctcttcttcgagcagctgcggctgcgcaccacggtgtccgggtggttcttcgtgtcggacaacgccgaccagggctccagctccgataactgcgtactgccgcggaggcccgacgacgatctggacctggcagcccggtccgaggtgacgacggacgaggacggctccgcggcggcccagcacgagccgtcgccggcgatgagcgtcgcggagatccaccgcccggggaagcccaagagcaccctgagccggctgttagggaagctcgggctcggcgggaggtcgtcgtcgcggcagcgccagcagcaaccgccgctgccgggcgccagtgacaagaggcgcaggtccttcgatttcgggtgttaa

SEQ ID NO: 174 - protein, 620 aa, Zea mays
  ref <308>: DATABASE ACCESSION NUMBER: GRMZM2G159161
MAAPATRVIGSKPADCFQFQDPNTWTCVSELASDVVVEVGDTSFHLHKIPLTSRSGTLQKLVNESTGDGSKPCTVRLDDVPGGAEAFLLAARFCYDVQTELNAGNAVPLRCAAERLAMTEDYGEGNLVEQAESFLSEVLAGWSDTVRALGTCDDAVLPAAEDLLIVQRCIDSLADKACADPTLSGWPMLEYFTAKSLEETAIWTGIGAAGRPRSPGAGWWYDQASSLPLPLYKRLIAAVRSRGMSPENVAGSLMHYARRHLSGLRRLGDNSDGSSRGGAAAVLSGGDQRTLLEEIVAMLPVEKGVAPTRFLLGLLRVATVLHAAAACRDALERRAGDQLEEAALEDLLIPNTGYSAETLYDVDSVQRMLEQFMMTTPPAFAVLPETTDEGQLVDAPPGELMPVSSVGKLVDGYLAEVGTDANLKPSKFQTIAALVPDYARAIDDGLYRAIDIYLKAHPWLTDSEREQLCRLMNCQKLSLEACTHAAQNERLPLRVVVQVLFFEQLRLRTTVSGWFFVSDNADQGSSSDNCVLPRRPDDDLDLAARSEVTTDEDGSAAAQHEPSPAMSVAEIHRPGKPKSTLSRLLGKLGLGGRSSSRQRQQQPPLPGASDKRRRSFDFGC

SEQ ID NO: 175 - DNA, 1008 bp, Zea mays
  ref <308>: DATABASE ACCESSION NUMBER: GRMZM2G021777
atggacaccgcggcggagctggagctggggctggagttggagcagaagccggcggcggggtactggagcgtggtgggcgcgcgcccttgcgacgcgtgcgccgcggagccggcgcggctgcactgccgcgcggacggcgcgttcctgtgccccggctgcgacgcccgggcgcacggcgccgggtcgcgccacgcgcgcgtctggctgtgcgaggtctgcgagcatgcccccgccgccgtcacctgccgcgccgacgccgccgcgctgtgcgccgcctgcgacgccgacatccactcggccaacccgctcgcgcgccgccacgagcgcctccccgtcgcccctctcttcggcgcgctcgcggacgcgccgcagcccttcccgtccccggccttcgctgccgccgcgggggccgaggccccagctcagggggaagcggtggcggaagactacgggagcagcgaggccgaggcggcgtcgtggctgctccccgagcccgacaacagccacgaggacagcgccgccgacacgttcttcgcggagtcggacgcgtacctcggcgccgacctcgacttcgcccggtgcatggacggcgtcaaggccatcggcgtgccggtcgcgccgcccgagctggacatcggtgccggcagcttttgctaccccgaacactccatgaaccacattttgtcgtcatcctcggaggtggcggtggtaccggacgcgcaggcggccggcctgccggtggtggtggtggtgagcagaggggaggagcgggaggcgcggctgatgcggtaccgtgagaagcgcaagaaccgccggttcgacaagaccatccgctacgcgtcccgcaaggcgtacgccgagacgcggccgcgcatcaagggccgcttcgccaagcgccgctccgcggagggcgaggacgaggcgctggagcacgaggaaggggcgtgcttctcgcccacggggtcggcgcccgccgcgtcggacggcgtcgtcccgtccttctgttga

SEQ ID NO: 176 - protein, 335 aa, Zea mays
  ref <308>: DATABASE ACCESSION NUMBER: GRMZM2G021777
MDTAAELELGLELEQKPAAGYWSVVGARPCDACAAEPARLHCRADGAFLCPGCDARAHGAGSRHARVWLCEVCEHAPAAVTCRADAAALCAACDADIHSANPLARRHERLPVAPLFGALADAPQPFPSPAFAAAAGAEAPAQGEAVAEDYGSSEAEAASWLLPEPDNSHEDSAADTFFAESDAYLGADLDFARCMDGVKAIGVPVAPPELDIGAGSFCYPEHSMNHILSSSSEVAVVPDAQAAGLPVVVVVSRGEEREARLMRYREKRKNRRFDKTIRYASRKAYAETRPRIKGRFAKRRSAEGEDEALEHEEGACFSPTGSAPAASDGVVPSFC

SEQ ID NO: 177 - DNA, 696 bp, Zea mays
  ref <308>: DATABASE ACCESSION NUMBER: GRMZM2G314882
atgatgaactgcgccggaggcggagaccccgtggaggacttcctgatctccggcgccgtcgacgacgaagatctagccatcttctgcgacggaggacttgggattgagggtgtcaatggagatgcttgtggatttgagcagtctaatttgggcaaaaggggtagagatgaaccatgttcatctggtctaaaatccaaagcttgtcgtgaaaaaatgaggagggacaagctgaatgacaggttcctggaattaagttcggttatgaatcctggaaaacaagcaaagttggataaagccaatatcttgagcgacgcagcccgtatggtggcacaacttagaggtgaggcagaaaagcttaaagaatcaaatgagaagctgcgggagaatatcaaggacctgaaggaggagaagaatgagctccgcgaagagaaagtgaggctgaaggtagagaaagataggctggagcagcaagtcaaagccatgagtgtagctcctacaggatatgttccccatctccctcatccagcttcataccacccggctgcatttgctccatttgtgccgccacagcaagctgcaggcaacaaaagtgctccaatccctgcacctttccctgggatggcaatgtggcagtggctgcctccgaccatcgtggacacaactcaagacccaaagctctggccgcctaatgcttag

SEQ ID NO: 178 - protein, 231 aa, Zea mays
  ref <308>: DATABASE ACCESSION NUMBER: GRMZM2G314882
MMNCAGGGDPVEDFLISGAVDDEDLAIFCDGGLGIEGVNGDACGFEQSNLGKRGRDEPCSSGLKSKACREKMRRDKLNDRFLELSSVMNPGKQAKLDKANILSDAARMVAQLRGEAEKLKESNEKLRENIKDLKEEKNELREEKVRLKVEKDRLEQQVKAMSVAPTGYVPHLPHPASYHPAAFAPFVPPQQAAGNKSAPIPAPFPGMAMWQWLPPTIVDTTQDPKLWPPNA

SEQ ID NO: 179 - DNA, 1566 bp, Zea mays
  ref <308>: DATABASE ACCESSION NUMBER: GRMZM2G016749
atggtggatgtggaactgttttataaggacactagtgatcacagcattagctctgaggaagaagatatgcttgtcaggagctgtagcaatctcaatgtgagctttggatatcattgtgattcttatcagagcttttctcctgaaaatgatcatggaaatgacatttctcctaagaacatgtttgggactaatacgatgatggggtcacggaatggctcatttacttgtttgtccggtgctgctattagtgcaaattttacattggcaaatacaaatatttgcaatggtcttattggcgaagaaattttaccagaactagattctccaaactccttcagaaaaattatttcatctccatcaatgtcaagattggactcgttctctacctcacaaggcagtcctgtgtcaactgagagctcaatatttgagatcagtaaaaatatttggaggtccagtgccccaacaactgtatcatccaattttctgactaatacagaggtgaaaatggctggcggagctgctggagaggatagagtccaagctgtgtgctcagagaaaaatggatggctgatttgtgggatatatgatgggtttaatgggagggatgcagctgattttcttgcggtaactctatatgataacatagtatattacttatacctgctggagaatcggataaggcaacaaaatggtttgtacaattcatcagaaagctctcttaatggtctcaaaagtgagttaacactagccatgagaaattcagaaaatgaaggcataaaattttctgaaacatttcgatctggtgtactgaattgcctttctactgctgttgagcaagctgagaatgactttttatgcatggttgaacaagagatggatgatagaccagatttagtttcggtagggtcttgtatcctggttgttcttcttcaaggaacagatctgtgcatcttaaatatgggggacagtagagctgtgcttgcttccatgccatatgtagaaaatggtgctttgaaggctactcaactgacagagacccactcgcttgaaaatcctttggagtaccaaaaacttttagctgaacatcccaatgattcttcagttgtcaggggtaacaaaataaaaggaaagctgaaggttactcgtgcttttggagttggctatctaaagcagaggaagttcaacgacgcactcatgggcattctgcgagtccgcgatttgagcagccctccatatgtttacacaaatccacacacattgagtcacaaagttacagatgatgatttgtttgttgtgcttggtagtgatggcttatttgatttcttcagcaatgatgaagttgttcggttggtttatcaatttatgcatgataatccaatgggggatcctgcaaaatatcttattgagcaacttatactcaaagcagccaaggaagcagctctaacagccgaagaattgatgaggatacctgttgggagtaggagaaagtaccacgatgatgtgactgtcattgttatcatccttggaaatgcacagaggacgatgactgcatcaacttccttgtga

SEQ ID NO: 180 - protein, 521 aa, Zea mays
  ref <308>: DATABASE ACCESSION NUMBER: GRMZM2G016749
MVDVELFYKDTSDHSISSEEEDMLVRSCSNLNVSFGYHCDSYQSFSPENDHGNDISPKNMFGTNTMMGSRNGSFTCLSGAAISANFTLANTNICNGLIGEEILPELDSPNSFRKIISSPSMSRLDSFSTSQGSPVSTESSIFEISKNIWRSSAPTTVSSNFLTNTEVKMAGGAAGEDRVQAVCSEKNGWLICGIYDGFNGRDAADFLAVTLYDNIVYYLYLLENRIRQQNGLYNSSESSLNGLKSELTLAMRNSENEGIKFSETFRSGVLNCLSTAVEQAENDFLCMVEQEMDDRPDLVSVGSCILVVLLQGTDLCILNMGDSRAVLASMPYVENGALKATQLTETHSLENPLEYQKLLAEHPNDSSVVRGNKIKGKLKVTRAFGVGYLKQRKFNDALMGILRVRDLSSPPYVYTNPHTLSHKVTDDDLFVVLGSDGLFDFFSNDEVVRLVYQFMHDNPMGDPAKYLIEQLILKAAKEAALTAEELMRIPVGSRRKYHDDVTVIVIILGNAQRTMTASTSL

SEQ ID NO: 181 - DNA, 1257 bp, Zea mays
  ref <308>: DATABASE ACCESSION NUMBER: GRMZM2G052667
atgtgcggcggcgccatcctctcgggtttcatcccgccgtccggggtggcggcggcggcggcggcggccaagaagcagcagcagcagcagcagcggtgccgtgtgactgcggacctgctatggccggggcccggcagtaagggagctccccaggacaaggaggaggacttcgaggccgacttccgcgagttcgagcgcggcctcggcgaggatgacgtggacagcgccggcgaaggcggcgaccccgaggtccaggagcttcctccgccggagccgacgaggtttgccttcgccaccgcggccaaggcggcagttgatggcgtgatgactcctcctccaaaggatgtccaaggagatagagcagtaaaaaagcgcggccggaagaaccagtacaggggaatcaggcagcggccttggggcaaatgggcagctgagatcagggaccctaacaagggcgtccgcgtctggctcggaacctacaacaccgccgaggaggcagctagggcatacgacgccgaagctcgcaagatccgcggcaagaaagcgaaggtgaattttcccgatgacgcgacaggcactcgtcacaggccaacgaccgatgagatctttaacaacctgaagaacgacgacaacaacaacaacgatgatctgtttgcgatgtttgcgttcggtgacaataagaagaaggttcctgcagcgaagccagccgccgccgagggtggcagtggcagtggcagcttcctcgtccctgcgcctgcggtggcggtggtgcccggtaataagaggaggtcgtccgcgaccaacactatgctctccgtctccgacgaccagcgcagcaactcctacggctccggctcctccgacttggtggggtcgtggtcgtgggacgacgacgcggcggccgccgccatgacctcggactacacctcctcggtcttcgctcccgataacgccgtgctgccggcggcgtcttacacgcaaggcggagcgccgaagagaatgaggagcagctacggcggcgcgccgcccagcctcgcacatgacgcggccatgcctggctttggccttgataaagtgagctaccaccactaccaggcgttgcctccttattacgtcgggagcagcaacgcgtcggtgggcaacctcggtcttctgcagcaggctgatgatgctccagctccacaggatggggcgagcgccggggatatctggagcctcgacgagctgctcatgctggcagcagctggtgcttattga

SEQ ID NO: 182 - protein, 418 aa, Zea mays
  ref <308>: DATABASE ACCESSION NUMBER: GRMZM2G052667
MCGGAILSGFIPPSGVAAAAAAAKKQQQQQQRCRVTADLLWPGPGSKGAPQDKEEDFEADFREFERGLGEDDVDSAGEGGDPEVQELPPPEPTRFAFATAAKAAVDGVMTPPPKDVQGDRAVKKRGRKNQYRGIRQRPWGKWAAEIRDPNKGVRVWLGTYNTAEEAARAYDAEARKIRGKKAKVNFPDDATGTRHRPTTDEIFNNLKNDDNNNNDDLFAMFAFGDNKKKVPAAKPAAAEGGSGSGSFLVPAPAVAVVPGNKRRSSATNTMLSVSDDQRSNSYGSGSSDLVGSWSWDDDAAAAAMTSDYTSSVFAPDNAVLPAASYTQGGAPKRMRSSYGGAPPSLAHDAAMPGFGLDKVSYHHYQALPPYYVGSSNASVGNLGLLQQADDAPAPQDGASAGDIWSLDELLMLAAAGAY

SEQ ID NO: 183 - DNA, 516 bp, Zea mays
  ref <308>: DATABASE ACCESSION NUMBER: GRMZM2G073892
atgccgaggagcccgcagctgagcctgagcggctgcagctctctcttctccctgtccagcaccagtacgagccgcgacagcgccgccctgaaggcgccggtgccagcgccaccggcaggcgcggtgcccccacggcgcacccctctcctgtcgctcagcgtcggcgaggaggaagaggacgagggtgaggacgaggaggagtacctgctgggggccggcgccctggatctgcagctgacggggcccggtggcggcagcaacagcagcggcggctacgacgacgagcggaagaacatccggatgatgaggaacagggagtctgcgctgcgctccagggcaaggaagagggcctatgtgcaggagctggagaaggaggttcgtcgcctggtgaatgagaacctcaagctcaagaggcagtgcaaacaactgaaactagatatggctgcactggtccagcaaagcagcagcaagagcagctcccacatcagaagaacctcctcatccactcagctctag

SEQ ID NO: 184 - protein, 171 aa, Zea mays
  ref <308>: DATABASE ACCESSION NUMBER: GRMZM2G073892
MPRSPQLSLSGCSSLFSLSSTSTSRDSAALKAPVPAPPAGAVPPRRTPLLSLSVGEEEEDEGEDEEEYLLGAGALDLQLTGPGGGSNSSGGYDDERKNIRMMRNRESALRSRARKRAYVQELEKEVRRLVNENLKLKRQCKQLKLDMAALVQQSSSKSSSHIRRTSSSTQL

SEQ ID NO: 185 - DNA, 762 bp, Zea mays
  ref <308>: DATABASE ACCESSION NUMBER: GRMZM2G449950
atgcaggagttccaatccatcccggggctggcggggcggctgttcggcggggcagcggccgccggcctccggcgcgcgcaggggcagtgcggcggcgggggtgcctcggccgcggcggccgtgaagtgcccgcggtgcgagtccaccaacaccaagttctgctactacaacaactacaacctgtcgcagccgcgccacttctgcaagggctgccggcggtactggaccaagggcggcgtcctgcgcaacgtgcccgtgggcgggggctgccgcaaggccaagcgctcgtcggcgccgtccacgcccacgcccacgcccacgtcggcggtgggcgacgccaagagcccgcgccgcgcctcggcgtcctcgccccgcggctccatcagcagcggcagcggcagcgcgagccccacgcccaacggcttcgccttctcctccacggccgacgtggtggcgccgccgccggcgccgatattcgccgatcaggcggcggcgctggcgtctctcttcgcgcctccgccgccgctcccggcgttcagcttcgtggcggcgcaggctaaggaggaaacgtcctccacccccgctggcttcgcggcgccgtactcctcagtatccgaggacatggcaccgttcgcgtccctggacgccgctgggatgttcgagatcggcgaggacgcgtcggccgcggcggcgtactggaacgccgggagctgctggacggacgtgccggacccgagcatgatgatgtacctgctaccctag

SEQ ID NO: 186 - protein, 253 aa, Zea mays
  ref <308>: DATABASE ACCESSION NUMBER: GRMZM2G449950
MQEFQSIPGLAGRLFGGAAAAGLRRAQGQCGGGGASAAAAVKCPRCESTNTKFCYYNNYNLSQPRHFCKGCRRYWTKGGVLRNVPVGGGCRKAKRSSAPSTPTPTPTSAVGDAKSPRRASASSPRGSISSGSGSASPTPNGFAFSSTADVVAPPPAPIFADQAAALASLFAPPPPLPAFSFVAAQAKEETSSTPAGFAAPYSSVSEDMAPFASLDAAGMFEIGEDASAAAAYWNAGSCWTDVPDPSMMMYLLP

SEQ ID NO: 187 - DNA, 1299 bp, Zea mays
  ref <308>: DATABASE ACCESSION NUMBER: GRMZM2G145041
atggagtccatggcgcaggaaagggacgcgttggattcacctgccttgtcgattgacaaaaggctgcggtcggatgctgtcgaatcacccctggtggatgatgcaacgcaacccaaggagggggcggacggttaccctgtcaaggttcggaagccttacacgatcacgaagcagcgagagaagtggacagaggaagagcatgggaagttcctggaggcactgaagctctatggtcggtcttggcgccagatacaagaacacattggcacaaagactgctgtccagattcggagccatgctcagaagtttttctccaaggtcgtgcgtgaacctggggccagtaattcaattgagatcccaccccctaggccaaagagaaaaccactgcacccataccctcgcaagtgtgccgactccaccgtgacaaatgctccaatgggcgaaccgaagaatgctcctgtttcatcaccatctggttctgaccaagagaatggttcgcctgtctcggtgttatctgcaatgcagtcggatgcttttggttcatcaatatcaaacccatcaactgggggcacgtctcctgcgtcatcagatgatgggaataatgtccctgagatagtgaatggggaggaaaatttgctcactcagcaaatagaagaccgatcccatcaggaatcaaagcaggacaacagtgatggtgagctgtctgaagaagattcatcacgagtccaagaaaccagtttgaagctttttgggaagacagttatcatcccagacccaaagaaagtctgttcctcggatgggggagctggagatgatacacaagaagtgatgcaaacatcctgggttggaggaggggtggcagcataccctgcccataacggatggtttcttccgttccattctttccctgctcatatgtatgagtcaggggatgctaggatttcccctcttcatatgtggtggccttactacggttttccggccggccatccaagagggtttggcacagggctgcttaacgaaggcgccattgagagtgatgccgacaatagcccatcggttgaaactaattctgatcgcacgggcaatgttcatgttcagacgacgacccctaccattcacaacaatgctgtcaaggagtcagttgggccagttgagatgccagagtcgggtccgagcattgagctgaaacccagcgcgaactcggcctttgtaagagtgaagccgagcagcagcgtcagcggagaccaatcactggtaagggggttcgtgccatacaaaagatgtaaggtcgaataa

SEQ ID NO: 188 - protein, 432 aa, Zea mays
  ref <308>: DATABASE ACCESSION NUMBER: GRMZM2G145041
MESMAQERDALDSPALSIDKRLRSDAVESPLVDDATQPKEGADGYPVKVRKPYTITKQREKWTEEEHGKFLEALKLYGRSWRQIQEHIGTKTAVQIRSHAQKFFSKVVREPGASNSIEIPPPRPKRKPLHPYPRKCADSTVTNAPMGEPKNAPVSSPSGSDQENGSPVSVLSAMQSDAFGSSISNPSTGGTSPASSDDGNNVPEIVNGEENLLTQQIEDRSHQESKQDNSDGELSEEDSSRVQETSLKLFGKTVIIPDPKKVCSSDGGAGDDTQEVMQTSWVGGGVAAYPAHNGWFLPFHSFPAHMYESGDARISPLHMWWPYYGFPAGHPRGFGTGLLNEGAIESDADNSPSVETNSDRTGNVHVQTTTPTIHNNAVKESVGPVEMPESGPSIELKPSANSAFVRVKPSSSVSGDQSLVRGFVPYKRCKVE

SEQ ID NO: 189 - DNA, 1113 bp, Zea mays
  ref <308>: DATABASE ACCESSION NUMBER: GRMZM2G112764
atgatgcgggacggcgtgcctccgtcggtggccggctccggcggcgcggcgggcggcgacgggcccaggcgatgctcgcagtgcgggcaccacgggcacaacgcgcgaacctgcacggcgcggcccgtcaagctcttcggcgtgcgcatcggggacaagcccatccggaagagcgccagcatggggaacatcgcgcacctcgccgcggagggcagcggcggcagggaggaagggtacggctccgacggggagcgcccgcacaagaagcgaggtgaggcatggactgaagaggagcacaagaagtttctgcttgggttgaataagctagggaaaggcgattggcgtggtatatcccgtaaatatgttgtttcaaggacacctactcaagtggctagccatgcgcaaaagtatttcaatcgccaaacaaatgtgcatagaagaaagagaagatcaagcctattcgatatggtgattgatgacccgtctgatcaacttccgctctcgcgttcatcttcacaagaaatggagcagcaacatttagatgatccacagcctgttgcagccctgcctgcacctgtggtctctccagctactgtggtacctcctgtgcctgtggaagtgtctgcttcagttccatcgccagttcaggtcccagttccagtttcagccccagtgatgacatctcagcctatggaacaggactcagataccacaagttcaattgctggagaggcaggaacggtgatgccaggagccatgcccccctatctttatccaatgatgattcctcctccatactaccatactgcttttgtaccaatgccctgctacggttatgttcctttttactgtgagccacaaggtgctgcacaggctccgcatgaggttgtcaagccagtggctgttcattcaacgcctccactgaatgccaaagacctttacaacatgtctgaattgagcctgaagggcgactcgaatgcaaacggtggtgtgcctgcttcccccttgcctccgaagccgatcggtagaccagagaggcaatctgctttccatggcaaaggacctacacctaccggtggctcgtcaggtggactgattcctgcagtcaagtga

SEQ ID NO: 190 - protein, 370 aa, Zea mays
  ref <308>: DATABASE ACCESSION NUMBER: GRMZM2G112764
MMRDGVPPSVAGSGGAAGGDGPRRCSQCGHHGHNARTCTARPVKLFGVRIGDKPIRKSASMGNIAHLAAEGSGGREEGYGSDGERPHKKRGEAWTEEEHKKFLLGLNKLGKGDWRGISRKYVVSRTPTQVASHAQKYFNRQTNVHRRKRRSSLFDMVIDDPSDQLPLSRSSSQEMEQQHLDDPQPVAALPAPVVSPATVVPPVPVEVSASVPSPVQVPVPVSAPVMTSQPMEQDSDTTSSIAGEAGTVMPGAMPPYLYPMMIPPPYYHTAFVPMPCYGYVPFYCEPQGAAQAPHEVVKPVAVHSTPPLNAKDLYNMSELSLKGDSNANGGVPASPLPPKPIGRPERQSAFHGKGPTPTGGSSGGLIPAVK

SEQ ID NO: 191 - DNA, 1638 bp, Zea mays
  ref <308>: DATABASE ACCESSION NUMBER: GRMZM2G028039
atgcccataaaatttgcactagaaaatatgtcgacacaagcctctaaccggtcatacagatatccagacagaacccaactgccgtaccacaatggcaatccaatgcatgttgggggcaatggtaattactgtgtgcaacaaaatcacgatgatgttaactacatttcctctgatgatggatcacagagcagtagttctagagttcaagattttcaagcacagttttgcaccctagattcgtcttcggccaattgtgtttatcctgcacatagttctacctcttctcagagcataagtggaagccctctgtctcagcaggagagccactctgatcatgcatatggttcctctccaagtgcatcgtgcatcactcaggttcccacctggacacttaaggatctagaaaatgtgatgcttggacccgattctgacataggtagccctgacagttcctttctgcttgacactgccttgcatggaaataactggagagaacttttgggaattcaaactggggatttgaggcaggtaattgtagcatgtggtaaggctgttgacgagaatgctgtctatatggatgcattgatgtctgagttaagggagatggtttctgtctctggtgaaccgatgcaacgtctgggagcttacatgttggaaggcctcattgcgaggctttctttcactggacatgccttgtataaatctctgaagtgcaaagagcctgtggctacgagttctgagctcttgtcctatatgcatcttctttatgagatctgtccattcttcaagttcggttacatgtctgccaatggtgccatagctgaagcggttaagggggaagacattattcacatcatcgattttcaaatcgctcagggtagtcagtggatgactatgatacaggcccttgcttcaaggcctgggaggcgaccatacctaaggatcactggcatagatgactcgaattctgctcatgcccgaggtggtggactggatatggttggacagaggttgcacagaatggcccagtcatgtggtctgcccttcgagttcaatgctgtgccagcagctagtcatgaggttgtgtttgaagatctttgtctaagatctggggaggccatcgttgtcaattttgcttatcagctgcatcatactcctgatgagagcgtgggcatagaaaaccatcgtgatagaatactgagaatggtcaagagcctctctcctaaggtggtaactcttgtagagcaggaggcaaacacaaacacagcacctttctttcttagatacatggagactcttgattattacacagcgatgtttgaggcaatagatgttgcttgccccagggatgataagaagcgcattagcacagagcaacactgtgttgcaagggatattgtcaatttaattgcttgtgaaggtgcggaaaggatagagagacatgagccttttggaaagtggagggcaagacttgtaatggctggttttagaccatacccgttaagtccagtggtgaacagaaccatcaaaacactgcttgacagttaccacagccattacaggcttgaggagagagatggcatcctttatcttggctggaagaacagaaagctggtcgtatcttctgcctggtgctga

SEQ ID NO: 192 - protein, 545 aa, Zea mays
  ref <308>: DATABASE ACCESSION NUMBER: GRMZM2G028039
MPIKFALENMSTQASNRSYRYPDRTQLPYHNGNPMHVGGNGNYCVQQNHDDVNYISSDDGSQSSSSRVQDFQAQFCTLDSSSANCVYPAHSSTSSQSISGSPLSQQESHSDHAYGSSPSASCITQVPTWTLKDLENVMLGPDSDIGSPDSSFLLDTALHGNNWRELLGIQTGDLRQVIVACGKAVDENAVYMDALMSELREMVSVSGEPMQRLGAYMLEGLIARLSFTGHALYKSLKCKEPVATSSELLSYMHLLYEICPFFKFGYMSANGAIAEAVKGEDIIHIIDFQIAQGSQWMTMIQALASRPGRRPYLRITGIDDSNSAHARGGGLDMVGQRLHRMAQSCGLPFEFNAVPAASHEVVFEDLCLRSGEAIVVNFAYQLHHTPDESVGIENHRDRILRMVKSLSPKVVTLVEQEANTNTAPFFLRYMETLDYYTAMFEAIDVACPRDDKKRISTEQHCVARDIVNLIACEGAERIERHEPFGKWRARLVMAGFRPYPLSPVVNRTIKTLLDSYHSHYRLEERDGILYLGWKNRKLVVSSAWC

SEQ ID NO: 193 - DNA, 1422 bp, Zea mays
  ref <308>: DATABASE ACCESSION NUMBER: GRMZM2G116785
atggacttctcagctggttcctacttctcatcatggcctatcaattctgcttctgagagctacagtttggctgatggttcagcggaatcatatggagaaggaagcatgccaccgtcaacctatttcatgacagctagatcagatcacaatttaaatttcagtgtgcatgaacaggattccactatgcttccaaacgaacagttgacctatgctggtgctggccagattgatctattacctgctgagactctatctagggataagcttcctgaaaatcttctggagcttcaaggacttcagaatatcagcaacctacagagtaatttagtggccccaggggtgtttcagcacaatttaacacctggggtctttcatccacagttgaacactcctggactttcagaactgcctcatgccttatctagttcaattgacagtaatggaagtgaagtttctgcttttctcgctgatctaaacgctgtttcttcagcgccaactttatgttccacattccaaaacgcttcttcgttcatggaaccagtgaatctagaagctttcagtattcaaggcgcacaaagtgattgtgttttgaacagaacaagtcatccgaatgggaatatctcagtatgtgacagtgctgccttggcatcactacatgatagcaaggagtttatcagtggtagtctcccttcttttgctagtgtccaggaaacaaacctagctgctagtggcttcaagactcagaagcaggagcaaaatgcagtgtgcaatatccctactttcactgcacggaatcaaatgtcagttgctgcaatgcaaggagcacttgtccctcaaaagattccttcacggatcaatgataataaaagtgagggtcctgttagccatccttctgatgtacaaactcaaccaaattcagctgttaatggtgttggtgtgaaaccacgagtaagggctcgtcgtggacaagcaactgatcctcatagtattgctgaacggcttcgcagagagaaaatttcagataggatgaaaaatctgcaggatcttgtcccaaattccaataaggcagacaaggcatccatgctggatgaaattattgattatgtgaagtttcttcagcttcaggtcaaggtcttgagcatgagtagggtaggagctccaggagcagttcttccccttctcacagaatctaagactgagggttaccacggccaacctctgccacaaggattactggacgcactagactcggaagacagcttcgtcttcgaggaagaggtcgtgaagctaatggagaccagcatcaccagcgcgatgcagtaccttcagagcaaggggctctgcctgatgccagtcgcccttgcttccgcaatatccacccagaaaggtgtgtccgctgctgcagtccctcctgaacggtga

SEQ ID NO: 194 - protein, 473 aa, Zea mays
  ref <308>: DATABASE ACCESSION NUMBER: GRMZM2G116785
MDFSAGSYFSSWPINSASESYSLADGSAESYGEGSMPPSTYFMTARSDHNLNFSVHEQDSTMLPNEQLTYAGAGQIDLLPAETLSRDKLPENLLELQGLQNISNLQSNLVAPGVFQHNLTPGVFHPQLNTPGLSELPHALSSSIDSNGSEVSAFLADLNAVSSAPTLCSTFQNASSFMEPVNLEAFSIQGAQSDCVLNRTSHPNGNISVCDSAALASLHDSKEFISGSLPSFASVQETNLAASGFKTQKQEQNAVCNIPTFTARNQMSVAAMQGALVPQKIPSRINDNKSEGPVSHPSDVQTQPNSAVNGVGVKPRVRARRGQATDPHSIAERLRREKISDRMKNLQDLVPNSNKADKASMLDEIIDYVKFLQLQVKVLSMSRVGAPGAVLPLLTESKTEGYHGQPLPQGLLDALDSEDSFVFEEEVVKLMETSITSAMQYLQSKGLCLMPVALASAISTQKGVSAAAVPPER

SEQ ID NO: 195 - DNA, 849 bp, Zea mays
  ref <308>: DATABASE ACCESSION NUMBER: GRMZM2G103647
atgaagaagtgcgcgtcggagctggagctggaggcgttcatccgggagagcggcgaggacgcccgcgccgccgccggaggtagcagtccggggtgcggtggatcaagcgatcccggagggagcggcgtcttctcacccggcttcggtttcgccgactcggacaccatggatggaggcagttggtggtacgggaacgtccgcacgccgaacccagtcatgtcgcaggcggcgtccatatccgctagccccgggctaaccacctcagccaatcatgctcttgaaagcgagtcagactccgacagcgaatcactgtatgaggtagagggagttccatacgagcgaggtaacagatccattgagacgaagcgaataagaaggatggtgtccaatagggagtctgcgcggcggtctaggaggaggaaacaggcacagttgtctgaccttgagtcacaggttgaacgactcaaaggtgaaaacgcaacactgttccagcaactttcagatgccaaccaacagttcagtactgcagtcacagacaacagaatcctcaaatccgatgtagaagcgttaagaattaaggtaaagatggcagaggatatggtagcgagaagtgctgtatcgtgtggcctaggcgaccttggcctggcaccatacgtgaactcaaggaagatgtgccaagctttgaatgtgctcacagggttggatttactagggagtgatgcgttcaggggtccaaccgcaggtacacgagtacagaactcaccagtacagagcactgcaagcctagagagtctggataaccgaaagtccaacgaggtgaccagttgcgcggcggacatttggccttga

SEQ ID NO: 196 - protein, 282 aa, Zea mays
  ref <308>: DATABASE ACCESSION NUMBER: GRMZM2G103647
MKKCASELELEAFIRESGEDARAAAGGSSPGCGGSSDPGGSGVFSPGFGFADSDTMDGGSWWYGNVRTPNPVMSQAASISASPGLTTSANHALESESDSDSESLYEVEGVPYERGNRSIETKRIRRMVSNRESARRSRRRKQAQLSDLESQVERLKGENATLFQQLSDANQQFSTAVTDNRILKSDVEALRIKVKMAEDMVARSAVSCGLGDLGLAPYVNSRKMCQALNVLTGLDLLGSDAFRGPTAGTRVQNSPVQSTASLESLDNRKSNEVTSCAADIWP

SEQ ID NO: 197 - DNA, 966 bp, Zea mays
  ref <308>: DATABASE ACCESSION NUMBER: GRMZM2G481163
atgtcttcctcgacctccgatgcggccagggacgacgtcgtctcatctcccgacctgccccccctgtccgcgcacgtcgccgcggcggctgctgcggccgcggcagcggcctcctcggggggaggaatagggctcgggggcgggggctccggccggaggctgccgccgccgtgctggacgcacgaggagaccctcgcgctcatcgaggcgtaccgcgacaggtgggaggcgctgaggaagggcaacctgcgcgcggctgactgggacgacgtggccaacgccgtcaccgctcgctgcggtcggttccccaccgccacgcataagtccggcgtgcagtgccgccacaagatcgagaagcttcgaaagcgataccgcgctgagcggtcgcgatccgcggggcggtccaaggggcccaagtggccgttcttcccgctcctccacgacctcgccggcggcggcgtgccggaccctagccctaacgccatcgtcaagatcaagaccaagggccctgccccgccggcatccccgccttcccctgtgtcctccccttcctcctccgaggaggctgtgcggagcaggagcctgcacgggctcatctccaacggcggggccgggagcgggctgcgcttcaccatccctaaggcctgccgcacgaagcccgccgcggcggcagctgtgaagccggagaggagcggcggcgaggacgacgccgagtcagaggcgatggccgaggtggctgccgcactgcggtccgtcggggaggggttccttcgtatggaggagcgcaggctcgagctgtcgcttcagatggagaaggaacgaatggagtcagagatgaagcgcacccagacgatgctcgacgcccaacagctcttcctcgaggccttcctgggtaagcagcagcagcagcagcagcacaagaaggccagggtctccccttcctctgccgcaatggaagaggactga

SEQ ID NO: 198 - protein, 321 aa, Zea mays
  ref <308>: DATABASE ACCESSION NUMBER: GRMZM2G481163
MSSSTSDAARDDVVSSPDLPPLSAHVAAAAAAAAAAASSGGGIGLGGGGSGRRLPPPCWTHEETLALIEAYRDRWEALRKGNLRAADWDDVANAVTARCGRFPTATHKSGVQCRHKIEKLRKRYRAERSRSAGRSKGPKWPFFPLLHDLAGGGVPDPSPNAIVKIKTKGPAPPASPPSPVSSPSSSEEAVRSRSLHGLISNGGAGSGLRFTIPKACRTKPAAAAAVKPERSGGEDDAESEAMAEVAAALRSVGEGFLRMEERRLELSLQMEKERMESEMKRTQTMLDAQQLFLEAFLGKQQQQQQHKKARVSPSSAAMEED

SEQ ID NO: 199 - DNA, 1545 bp, Zea mays
  ref <308>: DATABASE ACCESSION NUMBER: GRMZM2G089501
atgggcatccaagggaacaaggcggcgacgcacgagcacgacttcctctcgctgtacgccgccgccgccgccaaggacgctcctctcctgctacacgactccaaggcgccgcctccttctcaaggtaatttcctcttgaagacgcacgacttcctgcagccgttggatcagaagccgggagcgccgccggagccgtcgccgctgcccgcttccgccgcggagagcaggcaccagccgcagcagcaggtcgtcgtcgcgaaccagcacgcgctgcccctgcccggcggcgtcggcaccttcagcatcagccccgcgcccgtgtccgtcgcgctgccggcggccgtcgtcaagtcggagccgccgttcgtgctctggggccagcctgccgcgacgctccatccgggcgcgcgagggcaccagcagcagtgggcgctccccttcgccggcgccgggcaggtcaggctgccgccgcagcaggcgcctccggatagaaagggccggggcggcgccggtggcggcgtcatggagtctggctccagatccagcggcggggcggggttcgacgacgacgacggcctcacgacgcgccgcgaggtctcctcttcgctccaagatttgacagtaagggtggaccggaagggtgggagctgcagcgatggtggtacggatcagcggccaaacacaccgcggtcaaaacactcggccacagagcagcgcagacgcagcaagatcaatgataggtttcagatacttagggagctgttgccacacagtgatcaaaagagagacaaagcaacatttctcttggaggttattgaatatatacggtttttgcaagagaaggtgcaaaaatatgaggcaacatttccagaatggaaccaagaaaatgcaaagatgcttccatggtcaaatatgtattttcgatcattctggaaaaatgcacagagtaaaggccaaatctcaggagattccccgcctgacccttcacatttcatgagaaatggatcctcccctggatctaatttcactgggaaacttgatgataatcacaacatagtgacatctgcagctgcatcaggggcacaggatcaggtagaaaccgaccacatggctagcggatgctacagatcagcagaaactacggcgaattttacaaataatgctatgtctcagtcccaacctcaatggactggtccgtcccctgtggatgactctgcagtgaacagtgagacgcttaacaaccagcagttggtgattgatgaaggaacaatcagagtgtccagtaactattcccaagagttgcttaactcgttgactcatgcccttcaaagctcaggtgtagatttgtcccaagccaacatctctgtgcagatcaacatgggaaagcgtgccgccaagagacccgctgctggtgtatccagcaactccaaggaaccagctgatccggcatctagcaacgaattagggcatcagttgacgctgtcgggtgccggtgccgactgcctctctcacgcaacaaagcggcataaacggagcaacagctga

SEQ ID NO: 200 - protein, 514 aa, Zea mays
  ref <308>: DATABASE ACCESSION NUMBER: GRMZM2G089501
MGIQGNKAATHEHDFLSLYAAAAAKDAPLLLHDSKAPPPSQGNFLLKTHDFLQPLDQKPGAPPEPSPLPASAAESRHQPQQQVVVANQHALPLPGGVGTFSISPAPVSVALPAAVVKSEPPFVLWGQPAATLHPGARGHQQQWALPFAGAGQVRLPPQQAPPDRKGRGGAGGGVMESGSRSSGGAGFDDDDGLTTRREVSSSLQDLTVRVDRKGGSCSDGGTDQRPNTPRSKHSATEQRRRSKINDRFQILRELLPHSDQKRDKATFLLEVIEYIRFLQEKVQKYEATFPEWNQENAKMLPWSNMYFRSFWKNAQSKGQISGDSPPDPSHFMRNGSSPGSNFTGKLDDNHNIVTSAAASGAQDQVETDHMASGCYRSAETTANFTNNAMSQSQPQWTGPSPVDDSAVNSETLNNQQLVIDEGTIRVSSNYSQELLNSLTHALQSSGVDLSQANISVQINMGKRAAKRPAAGVSSNSKEPADPASSNELGHQLTLSGAGADCLSHATKRHKRSNS

SEQ ID NO: 201 - DNA, 891 bp, Zea mays
  ref <308>: DATABASE ACCESSION NUMBER: GRMZM2G126808
atggctcaggaggacgtgcacctggacgacgcaggcctcgcgctgggcctgtccctcggcagcggcagcggcggcgcctctggtgcggcgcgccacggtggtatcagccgccggctgagcagggaggtgcggctgccgtcgccgcacccgctggagccgtcgctgacgctgagcttgccggacgaagcgaccgcgaccgggtccggcgggggcggggccgcgcacagcgtgtcgtcgctgtcagtggcgggcgtgaagagggagcgcgtggatgacgccgagggagagcgggcgtcgtctacggccgcgttgccgcgggcctgcgccggcgccgaggacgacgacgacgacgggagcacgcggaagaagctgaggctgaccaaggagcagtccgcgctcctggaggaccgcttcaaggagcacagcaccctgaacccgaagcagaaagtcgcgttggcgaagcaactgaagctgaggccacggcaggtggaggtgtggttccaaaacaggcgagcaagccgcgcgcgcaggacgaagctgaagcagacggaggtggactgcgagctgctgaagcgctgctgcgagtcgctgacggaggagaaccggcggctgcagcgggagctgcaggagctccgcgcgctcaagttcgccccacacccacaggcgccgccgtcgtccgcgacgcaggccggcgcggcggcgggcgtcgttccggcgccgccgccgccgttgtacatgcagatgcagatgccggccgccgccacgctgagcctgtgcccgtcctgcgaccgcctggccgggcccggcgccgccgccaaggccgagcccaggcccaaggcagccgccacccaccacttcttcaaccccttcacccactccgccgcctgctga

SEQ ID NO: 202 - protein, 296 aa, Zea mays
  ref <308>: DATABASE ACCESSION NUMBER: GRMZM2G126808
MAQEDVHLDDAGLALGLSLGSGSGGASGAARHGGISRRLSREVRLPSPHPLEPSLTLSLPDEATATGSGGGGAAHSVSSLSVAGVKRERVDDAEGERASSTAALPRACAGAEDDDDDGSTRKKLRLTKEQSALLEDRFKEHSTLNPKQKVALAKQLKLRPRQVEVWFQNRRASRARRTKLKQTEVDCELLKRCCESLTEENRRLQRELQELRALKFAPHPQAPPSSATQAGAAAGVVPAPPPPLYMQMQMPAAATLSLCPSCDRLAGPGAAAKAEPRPKAAATHHFFNPFTHSAAC

SEQ ID NO: 203 - DNA, 660 bp, Zea mays
  ref <308>: DATABASE ACCESSION NUMBER: GRMZM2G097726
atggcggggaagtcgcgaccgcccaagcggatcctcgagtcctataccatcaagggttcggacagagtcatcaagcctggcgattgcgtgctaatgagggcatctgatgcttcaaagccaccttatgtggcaagagttgaggcaattgaagcagcaggatctcgaggcaccaatgtgagagtacgagtgcggtggtattatcgaccagaggagtccataggtggtcggcggccatttcatggttccaaggaggttttcctctctgaccactatgatgtacaaagtgctgacaccattgaggggaaatgcaatgtccacagcttccgtagctatacaaagcttgattctgtcaatgctgaggatttcttctgccgcttcgagtataaatcagctactggcagctttgtaccagatcgtatagcagtgttttgcaagtgcgagatgccatacaatccagatgaccttatgatccaatgcgaggaatgttctgactggtttcaccctgcttgcattgggatgacaatcaaagaagcaaagaaactcgagcattttttctgccagacctgtacagctgaaaatggtaagatggttgagaattcacatgaagctacagcgcaatcagaagaaaagccggtggagtcaaaaaggcggcgaaggtga

SEQ ID NO: 204 - protein, 219 aa, Zea mays
  ref <308>: DATABASE ACCESSION NUMBER: GRMZM2G097726
MAGKSRPPKRILESYTIKGSDRVIKPGDCVLMRASDASKPPYVARVEAIEAAGSRGTNVRVRVRWYYRPEESIGGRRPFHGSKEVFLSDHYDVQSADTIEGKCNVHSFRSYTKLDSVNAEDFFCRFEYKSATGSFVPDRIAVFCKCEMPYNPDDLMIQCEECSDWFHPACIGMTIKEAKKLEHFFCQTCTAENGKMVENSHEATAQSEEKPVESKRRRR

SEQ ID NO: 205 - DNA, 975 bp, Zea mays
  ref <308>: DATABASE ACCESSION NUMBER: GRMZM2G092214
atggaccccaagttccccacacccctagcgctaaacaaaacggagcccaccaccgcgacgaccaccaccacctcgaccgcgcagcatcatcagctggatcctaaggactaccagcagcagacggcgcagcaccaggagcagcagcagcaccaccatcacccccacctgcaaatccaaatccaccagccgccgccgccgccgcaggacgggggcggcggagtgaaggagcagcagcagctgctgcaggtggtggcgcagcccggggatcggaggcagcaggcgctcgcccccaagcggagctccaacaaggaccgccacaccaaggtcgacggcaggggccgccggatccggatgccggcgctctgcgccgcgcggatcttccagctcacgcgggagctcggccacaagtccgacggcgagactgtgcagtggctgctgcagcaggccgagccggccatcgtcgccgccaccggcacgggcaccataccggcgtccgcgctcgcctccgtcgcgccctcgctcccgtcgcctacctccgggctcgccaggccgcaccaccaccacccgcaccacatgtgggcgccgtccgccggcttctcctcgccctccttcctgaattccgcgggcgcgggcgacggcaccggtatcggcggcatcatgcagcggatgggggtccccgcgggcctggagctgccgggaggcggcgccgccggcggccacatcggctttgcgcccatgttcgctggacacgccgcggccatgccggggctcgagctcggcctctcgcaggacggtcacatcggcgtgctcgccgcgcagtcgatcagccagttctaccaccaggtgggtgccgctgccggcggcagtggccagatgcagcacccgcacgggcaccagcatcaccatcatcagcagcaggaggacggggaggacgaccgcgaggacggcgagtctgatgacgagtctgggcagtag

SEQ ID NO: 206 - protein, 324 aa, Zea mays
  ref <308>: DATABASE ACCESSION NUMBER: GRMZM2G092214
MDPKFPTPLALNKTEPTTATTTTTSTAQHHQLDPKDYQQQTAQHQEQQQHHHHPHLQIQIHQPPPPPQDGGGGVKEQQQLLQVVAQPGDRRQQALAPKRSSNKDRHTKVDGRGRRIRMPALCAARIFQLTRELGHKSDGETVQWLLQQAEPAIVAATGTGTIPASALASVAPSLPSPTSGLARPHHHHPHHMWAPSAGFSSPSFLNSAGAGDGTGIGGIMQRMGVPAGLELPGGGAAGGHIGFAPMFAGHAAAMPGLELGLSQDGHIGVLAAQSISQFYHQVGAAAGGSGQMQHPHGHQHHHHQQQEDGEDDREDGESDDESGQ

SEQ ID NO: 207 - DNA, 1086 bp, Zea mays
  ref <308>: DATABASE ACCESSION NUMBER: GRMZM2G019106
atgggaagcaatgaccctaacacaccctcgaaggcttcaaaggcgtcagaacaagatcaacctccagctaccaccacatccagtggaacagcttcagtgtaccctgaatggcccagctttcaggcctactcagcaattccaccgcatgcgttcttcccccctaccgttgctgcaaatccacaggcccatccatacatgtggggggctcagcccatagtgccaccttacgggacaccgccaccaccaccttatgtgatgtatccacctggaacagtatatgcccatccctctacacctcctgccatgcatccatttggccattatcctatgccaacaaatgggcatgctgaaactcatggagctgcgccaagcgctccggaaatgaatgggaaaagcgagcctggcagaacgtctgctccatccgccaacgggattacctcgcacagtgagagtggaagcgagagtgagagcgaaggaagtgacgacaattctcaaaacgattcacactcaaaggacaatgatgggaaggaagatggcaattctcagaacggcatgtcttattcaggatcgcaaggagtggtaaaccaaaccatggcgatgcttccaatgcaaccgggtgcaatggtcggaggagttcctagctccacggcagctaacctgaatatcggagtggactactgggcagctccgggttctgcggctgtccccgcagcgcacggcaaagcgccagctggttcagctcgaggagaccaatgggatgaaagggagctcaagaagcagaagcggaagcagtcaaacagagagtccgctcgcagatcccggctgcgcaaacaggctgagtgtgaggagcttgggcaacgtgctgaggctctgaggtcggagaactcgtcgctgagggccgagctcgagcggatcagaaaggagtacgaacagctactttcacagaacgcttccctaaaggaaaagctgggggctgccagtagtgattcgcttcctgatatgaacgaacagaacgacggcgacggagacggcggctacaggaagcagcctgattccgatggccaccagcctgggagcgagtcctga

SEQ ID NO: 208 - protein, 361 aa, Zea mays
  ref <308>: DATABASE ACCESSION NUMBER: GRMZM2G019106
MGSNDPNTPSKASKASEQDQPPATTTSSGTASVYPEWPSFQAYSAIPPHAFFPPTVAANPQAHPYMWGAQPIVPPYGTPPPPPYVMYPPGTVYAHPSTPPAMHPFGHYPMPTNGHAETHGAAPSAPEMNGKSEPGRTSAPSANGITSHSESGSESESEGSDDNSQNDSHSKDNDGKEDGNSQNGMSYSGSQGVVNQTMAMLPMQPGAMVGGVPSSTAANLNIGVDYWAAPGSAAVPAAHGKAPAGSARGDQWDERELKKQKRKQSNRESARRSRLRKQAECEELGQRAEALRSENSSLRAELERIRKEYEQLLSQNASLKEKLGAASSDSLPDMNEQNDGDGDGGYRKQPDSDGHQPGSES

SEQ ID NO: 209 - DNA, 603 bp, Zea mays
  ref <308>: DATABASE ACCESSION NUMBER: GRMZM2G113127
atggagcccaaatccaccacccctcccccgccccccgtgatgggcgcgcccatcgcgtatcctcccccgcccggcgccgcgtaccccgccgggccgtacgtgcacgcgccggcggccgcgctctaccctcctcctcccctgccgccggcgcccccctcctcgcagcagggcgccgcggcggcgcaccagcagcagctattctgggcggagcaataccgcgagatcgaggccaccaccgacttcaagaaccacaacctgccgctcgcccgcatcaagaagatcatgaaggccgacgaggacgtgcgcatgatcgccgccgaggcgcccgtcgtcttctcccgcgcctgcgagatgttcatcctcgagctcacccaccgcggctgggcacacgccgaggagaacaagcgccgcacgctgcagaagtccgacatcgccgccgccgtcgcgcgcaccgaggtcttcgacttcctcgtcgacatcgtgccgcgggacgaggccaaggacgccgactccgccgccatgggagcagccgggatcccgcaccccgccgccggcctgcccgccgccgatcccatgggctactactacgtccagccgcagtaa

SEQ ID NO: 210 - protein, 200 aa, Zea mays
  ref <308>: DATABASE ACCESSION NUMBER: GRMZM2G113127
MEPKSTTPPPPPVMGAPIAYPPPPGAAYPAGPYVHAPAAALYPPPPLPPAPPSSQQGAAAAHQQQLFWAEQYREIEATTDFKNHNLPLARIKKIMKADEDVRMIAAEAPVVFSRACEMFILELTHRGWAHAEENKRRTLQKSDIAAAVARTEVFDFLVDIVPRDEAKDADSAAMGAAGIPHPAAGLPAADPMGYYYVQPQ

SEQ ID NO: 211 - DNA, 1494 bp, Zea mays
  ref <308>: DATABASE ACCESSION NUMBER: GRMZM2G384339
atgcagggcggcggggtggccgccgccgcggtcccggtgcacgcggccgtggggggcgacggaggaggggcggccgccgcgccgccgccgccgttcctcatgaagacgtacgagatggtggacgacccggccacggacggcgtcgtgtcctggggccccgggaacaacagcttcatcgtctggaacacgcccgagttcgcccgagacctcctgcccaagtacttcaagcacagcaacttctcctcgttcgtcaggcagctcaacacctacgggtttagaaaggttgatccagacagatgggaatttgcaaatgagggttttctgagaggacaaaaacatctgctgaagactatcaacagaaggaaaccatccttgcagggtaacagccaaccacagcaacctcagttgcagaacgctcctgtgccttcgtgtgtagaggtgggtaagtttgggttggaggaagagattgaacggctgaaaagggacaagaatgttcttatgcaagagcttgtaaggctgagacagcaacagcaaacaactgaccatcagctccagactttgggcaagcgtcttcaagggatggagtcacggcagcaacagatgatgtctttcctggccaaagcaatgcaaagtcctggtttcctagcacagtttgtacagcgaaatgagaacagcaggaggagaatagtagctgcgaacaagaaaaggcggctgcccaagcaagatggtggactcgagtccgaaagttctgctgcttcgttagacggtcaaattatcaagtatcagccttcgatcaacgaagcagccaaagcaatgctaaggaagatcctaaacgtagattcttcgcataggtttgaatctatgggcaattcagataatagtaataataataatattctgctggaggattatatgccggccgcccaagcttttgagagctcttcgtcgacaagaaattctggggtcacccttgcagaggttccagcaaactcaggcttggcgtatgtcggcacgagctcggctatctgttctcctccagcggcccctgaaatgcagtgcccagtggtgctggataacaaggcgtacaagcaagtggccagcatgagtgctgtgcctcctgtttcaagtgacatgggtattattccggaattctcagatctggcagacttggtctctgtggatattcttggaggggcctttgagatgatgcctggtcctgagttccccctgccagaagaaggtgatgatgggaccaccatgtacaacaacaacgacgaggaggctcagagccttccaggcatcatcaactccatctgggagcagttcctggtaggcagccctctatctaccgataatgaggaagttgattcagcaggcggactatatgcgcaggaggatggatggagcaaagtggggaacatcgctaatcttacagaacagatgggacttgtatcatcaacaaatcaccgggactcagggaatgggctgtactag

SEQ ID NO: 212 - protein, 497 aa, Zea mays
  ref <308>: DATABASE ACCESSION NUMBER: GRMZM2G384339
MQGGGVAAAAVPVHAAVGGDGGGAAAAPPPPFLMKTYEMVDDPATDGVVSWGPGNNSFIVWNTPEFARDLLPKYFKHSNFSSFVRQLNTYGFRKVDPDRWEFANEGFLRGQKHLLKTINRRKPSLQGNSQPQQPQLQNAPVPSCVEVGKFGLEEEIERLKRDKNVLMQELVRLRQQQQTTDHQLQTLGKRLQGMESRQQQMMSFLAKAMQSPGFLAQFVQRNENSRRRIVAANKKRRLPKQDGGLESESSAASLDGQIIKYQPSINEAAKAMLRKILNVDSSHRFESMGNSDNSNNNNILLEDYMPAAQAFESSSSTRNSGVTLAEVPANSGLAYVGTSSAICSPPAAPEMQCPVVLDNKAYKQVASMSAVPPVSSDMGIIPEFSDLADLVSVDILGGAFEMMPGPEFPLPEEGDDGTTMYNNNDEEAQSLPGIINSIWEQFLVGSPLSTDNEEVDSAGGLYAQEDGWSKVGNIANLTEQMGLVSSTNHRDSGNGLY

SEQ ID NO: 213 - DNA, 1092 bp, Zea mays
  ref <308>: DATABASE ACCESSION NUMBER: GRMZM2G110333
atgtgcggcggcgcgatccttgccaaccttcgcgagccggcgccgcgccggctcacagagcgggacatctggcagcagaaaaagaagctcaagaggggcggcggcggcgggaggcgctcgttcgcggcggaggacgatgaggacttcgaggccgactttgaggtcttcgaggccgactccagtgattcagatttggagctcagggaggggactgacgacgacgtcgtcgagatcaagcccttcactgccaagaggactttctccagcgatggcttaagcaccatgactagtgctgtagcaaggtcagccaagaggaagagaaagaatctatacaggggtatccgccagcggccttggggcaagtgggctgctgagatcagagatcctcagaagggtgttcgtgtttggcttggtactttcaatagtcctgaggaagctgcaagagcttatgatgccgaagcgcgcaggattcgtggcaagaaggccaaggttaactttcctgatgcaccagcagttggtcagaagcaccgttctggctcagcttctgctaaagcatccaagtcaagttttggacagaagcctatcgtcaaagtagctatgaacaaccttgccaacacaaatgcatccttcttccaatctgctagctacccctccaatttatttgttcagcatggcaatatgccatttgttccagcaatgaactctactgcttctgttgatgatcttatcatgaatctgcactctgaccagggaagtaactcctttggctgctcagacttgggctgggagaatgataccaagacaccagacatcacttccattgctcccatttccactattgcggaaggcgacgagtctgcatttgtcgacagcaattcaaacagctcatttgtgcttcctgccctggagaacagtgctgttgatctcactgatgggctgacagatttagaatcctatatgaggtttcttctggatggtggtccaagtgattcagttgatagccttctgaaccttgatggatcgcaggatgttggtagcgacatggacctctggagcttcgacgacatgcccatcgtcggcgatttcttttga

SEQ ID NO: 214 - protein, 363 aa, Zea mays
  ref <308>: DATABASE ACCESSION NUMBER: GRMZM2G110333
MCGGAILANLREPAPRRLTERDIWQQKKKLKRGGGGGRRSFAAEDDEDFEADFEVFEADSSDSDLELREGTDDDVVEIKPFTAKRTFSSDGLSTMTSAVARSAKRKRKNLYRGIRQRPWGKWAAEIRDPQKGVRVWLGTFNSPEEAARAYDAEARRIRGKKAKVNFPDAPAVGQKHRSGSASAKASKSSFGQKPIVKVAMNNLANTNASFFQSASYPSNLFVQHGNMPFVPAMNSTASVDDLIMNLHSDQGSNSFGCSDLGWENDTKTPDITSIAPISTIAEGDESAFVDSNSNSSFVLPALENSAVDLTDGLTDLESYMRFLLDGGPSDSVDSLLNLDGSQDVGSDMDLWSFDDMPIVGDFF

SEQ ID NO: 215 - DNA, 1083 bp, Zea mays
  ref <308>: DATABASE ACCESSION NUMBER: GRMZM2G126832
atggctcatcaaaagcgtgaaggcagctacgccgatgatgatagtacatccaagcgcatcaaaggcaccgacactgcttctgaaacgggggacagtgtagagtctagtgtttcacagcaaatggatgctgaagctaggaggacctgccaaaaggaaagcgaagcaccatcggacaaatgcgtttcagatggggaatgcgctgcaaactctaaggttttgggtgagcagaagatggtattgactgttgtcgaggctgatgcggcggacgacaagggttgcaggcacactatggaggacgcctgggtggtgctccccaatgctggtgcagaatccccaggaagcttgaggtgcgtacattttgcgatttatgacgggcatggtggtcgcttggcggcagattatgcacagaagcatttgcatcagaatgtcatcgctgcaggattaccacgtgagttgatggatattaaagctgcaaagaaggctgtaattgaaggtttccgtagaactgatgaatctttactgcaagaaagtactaagggaaattggcaagatggtgcaacagctgtatgcgtttggatcctgggacagacggttgtagttgcgaatgttggagatgctaaagcagtattggctcgttctatttcaactgagggtgaaggtgtggttgatgagaccaaaagtcaactaaaggctattgttttgacaagagaacataaagccatcttttcacaggagcgctcccgaatccagaaggctggaggttctgttggctctaatggaagattacaaggtcgtattgaagtatcaagagctttcggtgatcgccagtttaagaaggttgggttgattgcaacaccagatgtccattcctttgaacttactaagaaagaccatttcatcattctagggtgcgatggcttatggggagtatttggaccaggtgatgctgtcgaatttgttcagaatcagttgaaggagacctcatcagccacacttgcggtgcgccgcctcgtgaaggaagctgttcgcgagaggcgatgcaaggataactgcactgctgttttgatcgtcttcaggcactag

SEQ ID NO: 216 - protein, 360 aa, Zea mays
  ref <308>: DATABASE ACCESSION NUMBER: GRMZM2G126832
MAHQKREGSYADDDSTSKRIKGTDTASETGDSVESSVSQQMDAEARRTCQKESEAPSDKCVSDGECAANSKVLGEQKMVLTVVEADAADDKGCRHTMEDAWVVLPNAGAESPGSLRCVHFAIYDGHGGRLAADYAQKHLHQNVIAAGLPRELMDIKAAKKAVIEGFRRTDESLLQESTKGNWQDGATAVCVWILGQTVVVANVGDAKAVLARSISTEGEGVVDETKSQLKAIVLTREHKAIFSQERSRIQKAGGSVGSNGRLQGRIEVSRAFGDRQFKKVGLIATPDVHSFELTKKDHFIILGCDGLWGVFGPGDAVEFVQNQLKETSSATLAVRRLVKEAVRERRCKDNCTAVLIVFRH

SEQ ID NO: 217 - DNA, 1395 bp, Zea mays
  ref <308>: DATABASE ACCESSION NUMBER: GRMZM2G397948
atggccttccccgccgacgcgctggttctagagatcaccgacacatcatcctccgccaccgccgccgccgcccgtgctccatcctcaccttctcccccgccgctgtccatctccgacctcgcgctaatcgagagctcctcctacttccgcgcgctcctcggcggcagcttcagtgaatccggcagagagcatgtgcgtgtgggctgcaatttggaggctgctgtgcaagtgctgcgctacctttttgagccttccgagagctttaacatcacgcacaacaatttcctccccctgttggagggagctttgtttcttgctgttgagagccttctagtggagtgtcaaagatggttcggcaccatagcctctcaaacttctgccatgtcagttccattagatttcataattgaagtctggtactttgctgaagagcatggtgttacttttgttcaagacatttgccaaaaatttctagctcagaattttgtagaaaatatgaaagcctgtgaacaatcaaaccccaactcagtagatggccacctcttcattcttagcaaggtgaagatatgccttttaccattaggatttgcggcagggacaatgaggcattggtttgactttggaaacaagatcatatgcactattcttgatcttctcaaagacagtttgaaaactttattggatgctgttgatgatggtaacttggatcgatattgcattcgaataacagaatattcaaagaacatagtgctttcaggatgtccccaagtaactacagcattcttgtacatatctgttctccctaatgatctgagtgtttcattgaagagaaggatagtgagttcatacacccaggttgatcatcaaaccttcgttctttatgaggaattagagaaggctactaaaaccttatcatttaagaatgtacacatggtggatatttcaaaatgtccaaacgttcattttggcgcagcaattgactggttgaagttgggttttccagaattaagggtattcagggtttcacattgtttatcatttcaatttgatgatttactatatctgttaatgagatgtccatggattgatgaaattgatatgactattgatacaagcactgtaacacccagacattcagtaatctcgtctagttctgaagtcctaagcaaggcaaaaccaaatcagaaaagatatggcatacattgttcagcatatgacaggcaaccaaattcggttttcttaaatatatcaagattgacattggaaggcagaaatgatattgatgatatggacttgttggagatatctgtcctgaaaaattctctgtgctatataaacattagaaactgcttcctgttgacggatgatgttttatgtctgtcttccactacttag

SEQ ID NO: 218 - protein, 464 aa, Zea mays
  ref <308>: DATABASE ACCESSION NUMBER: GRMZM2G397948
MAFPADALVLEITDTSSSATAAAARAPSSPSPPPLSISDLALIESSSYFRALLGGSFSESGREHVRVGCNLEAAVQVLRYLFEPSESFNITHNNFLPLLEGALFLAVESLLVECQRWFGTIASQTSAMSVPLDFIIEVWYFAEEHGVTFVQDICQKFLAQNFVENMKACEQSNPNSVDGHLFILSKVKICLLPLGFAAGTMRHWFDFGNKIICTILDLLKDSLKTLLDAVDDGNLDRYCIRITEYSKNIVLSGCPQVTTAFLYISVLPNDLSVSLKRRIVSSYTQVDHQTFVLYEELEKATKTLSFKNVHMVDISKCPNVHFGAAIDWLKLGFPELRVFRVSHCLSFQFDDLLYLLMRCPWIDEIDMTIDTSTVTPRHSVISSSSEVLSKAKPNQKRYGIHCSAYDRQPNSVFLNISRLTLEGRNDIDDMDLLEISVLKNSLCYINIRNCFLLTDDVLCLSSTT

SEQ ID NO: 219 - DNA, 873 bp, Zea mays
  ref <308>: DATABASE ACCESSION NUMBER: GRMZM2G006416
atgggggtgtacctcagcacgcccaagacggacaagctctcagctgatggagagaacagccgcgtccggttcggcctctcctccatgcaggggtggcggaccaccatggaggacgcgcatgctgccttgccagaccttgatgaatgcacatccttttttggtgtttatgatggccatggtggaaaagctgtatcaaaattttgtgcgaggcatttgcataaacaagtgcttataaatgatgcaaattcatctggtgatttgccaacctctctccataaagctttcttaagaatggatgagatgatgaaagggcagaggggttggagagaactaactgagctgggagataagggaaacaaaatctcaggtatgatagacgacataatatggcctcccaagggtggtgattcagataagataagggaagattgggataccgaggagggtccaaattcgaactttcctggaccaacatctggaagcacagcttgtgtggctgtcataagaaatgacaaattaattgttgcaaatgctggggattctcggtgtgttatctcacggaagggtcaggcttacaatttgtcaacagatcacaaaccagatcttgaggaagagagggagaggattttgggtgctggtggatttgttgttgccggacgggtcaatgcaagtctgaacttatctagggcaataggtgacatggaactgaagcaaaatgacctcctgccagtggagaggcagatcgtgacagctgaacctgaattgaaaacagtccagctctcggaggatgatgaattcattgttttagcttgtgatggaatttggaacaatttcgatgatgtttatcattcaatcaatcatagaaaatcctga

SEQ ID NO: 220 - protein, 290 aa, Zea mays
  ref <308>: DATABASE ACCESSION NUMBER: GRMZM2G006416
MGVYLSTPKTDKLSADGENSRVRFGLSSMQGWRTTMEDAHAALPDLDECTSFFGVYDGHGGKAVSKFCARHLHKQVLINDANSSGDLPTSLHKAFLRMDEMMKGQRGWRELTELGDKGNKISGMIDDIIWPPKGGDSDKIREDWDTEEGPNSNFPGPTSGSTACVAVIRNDKLIVANAGDSRCVISRKGQAYNLSTDHKPDLEEERERILGAGGFVVAGRVNASLNLSRAIGDMELKQNDLLPVERQIVTAEPELKTVQLSEDDEFIVLACDGIWNNFDDVYHSINHRKS

SEQ ID NO: 221 - DNA, 2184 bp, Zea mays
  ref <308>: DATABASE ACCESSION NUMBER: GRMZM2G045544
atgggggacgcccccgccgccgcggcggcagcgtcgcccgcttgtgccgcgcagaagcggagacgcggcgatgatggcgcggggctgaggcgggtggcggagatcgtgatggtgttggccgcggccggggaggtgcgcggcgggatggagcccacggcggcggagcgggcactcgcggccgaggcacgggagacgctggccgccgccgttgccgagggggccgtgcggcccaaggatctgttctcggtggaggcggtgcgcgcggtcgtcgaggatctcgggctcaaccgcgccaaggacccagctgccatggggtttcgcccgcccaaggcctccatcgccgataggcttatgcttactaagcgcaagatggaagaagtgaaggaagctccagtgcaatcaacagttagcgcacctcaaacagtcgtttcaagtggaatgtctgacttccatggtttgaatggggctactaagtttggtgttggagttcctagggacccaccagttccatctataaccgctagtgccccattaacctctacatccccagctaccttgaaaccaccagaatcatttcctgtaaaaccagtttccaactcatcggttgttcctgtactctattctggtccatcaaaccttaaatcggacaaaaatgtcagtggtcctctgaatttagcacacactggagcaactgttgtccactcaaacaagtcaactgtagatgcatctgctaggtccagtgtaaatgcttccaatcagatggtgaaaaaccaggacacaaaaccagtgacagttcaagccatggcaggtaatcctgctacggggcatcgtgctacacctactttcatcaatcacaatgagatagcaaagaatgttcaacagtttctgcaccaacctgcaaacaatcctagctggactccaccatcaactgattacatgcattctcgcttgagttgtcaaatatgcaaagttgttatcattggtacagacagtttacttgtttgtgatgcttgtgagaggggagtacatttgaaatgccttcagcagtatggcaataagggtgtccctaaagctgagtggcattgttctgcatgcctgactcagagtaagggcaaacccttaccaccaaaatatggcaaggttacaagaactgtagttgcatcaaaggctgctccacctggtggtggggcacagctttctttgcagggatcagcagaaaacatggcttcaaaggaaaatcaccaaaagttggctgcaaatgggaatcttatgaaaccaatctctattcaaggtggtagcacagcacccaacagtaatgtattggcactgagtgccatcacggctggttcacaatcacaattagtttctaccttgagaccatcaagagttgttaaagctgaaatgttctctattggaaaagaaggaactgggcaaccgtgcaatactacaatacaaccagctgtgagatcatcccctcttaacaaaagattgagaagtgattcctctttgaaccctgcagattccgcaaatgatatcatgcatggtaagtatactacagaaatttccggtgctgaagcaaaggtcaagtctgaagtgaactatgaggcctctgtgagtagagatgaggaattggttgatagtagtggaacatcaattgaaactgaacaaacaaaggttggtgctagtgaagaaaagcccaggacacaatcaacctttgagacagataaagtgaaagatggggggacgactaccaacacaggaacagcaacagatcaatgcagcaacttcggtactgaagaaaatctccccggtgaaataacttctgaggcacataaaatcactgacgtgaagatgactagcaatactggaacatctgtacagcaaagcaacattgatagtattgaagagaaggccagccagatcgatgcagtttctgatccacatgcacatataatccaagatatgggaatggacaccaacaatggaccaccagtagctgaaagcggcagtcctgttgctgaagaaaagccccccgaacaatcctcttcaattggtgatgtgtgtgtcaccgctaatgctggaattccaacagatcaaacacaacatccaaatgggtcaactgaaaatgtagtcaggaaatctcccaacagagaactatatgaagagaaatcaggcaggctgtaa

SEQ ID NO: 222 - protein, 727 aa, Zea mays
  ref <308>: DATABASE ACCESSION NUMBER: GRMZM2G045544
MGDAPAAAAAASPACAAQKRRRGDDGAGLRRVAEIVMVLAAAGEVRGGMEPTAAERALAAEARETLAAAVAEGAVRPKDLFSVEAVRAVVEDLGLNRAKDPAAMGFRPPKASIADRLMLTKRKMEEVKEAPVQSTVSAPQTVVSSGMSDFHGLNGATKFGVGVPRDPPVPSITASAPLTSTSPATLKPPESFPVKPVSNSSVVPVLYSGPSNLKSDKNVSGPLNLAHTGATVVHSNKSTVDASARSSVNASNQMVKNQDTKPVTVQAMAGNPATGHRATPTFINHNEIAKNVQQFLHQPANNPSWTPPSTDYMHSRLSCQICKVVIIGTDSLLVCDACERGVHLKCLQQYGNKGVPKAEWHCSACLTQSKGKPLPPKYGKVTRTVVASKAAPPGGGAQLSLQGSAENMASKENHQKLAANGNLMKPISIQGGSTAPNSNVLALSAITAGSQSQLVSTLRPSRVVKAEMFSIGKEGTGQPCNTTIQPAVRSSPLNKRLRSDSSLNPADSANDIMHGKYTTEISGAEAKVKSEVNYEASVSRDEELVDSSGTSIETEQTKVGASEEKPRTQSTFETDKVKDGGTTTNTGTATDQCSNFGTEENLPGEITSEAHKITDVKMTSNTGTSVQQSNIDSIEEKASQIDAVSDPHAHIIQDMGMDTNNGPPVAESGSPVAEEKPPEQSSSIGDVCVTANAGIPTDQTQHPNGSTENVVRKSPNRELYEEKSGRL

SEQ ID NO: 223 - DNA, 729 bp, Zea mays
  ref <308>: DATABASE ACCESSION NUMBER: GRMZM2G414844
atggaattcaggggccaggaggaggaggagcagcccgtctcggaggagatgggcgccagctccgcgccgtcgtccgcccccacccccgccccggggaaccaggaccacgccgccgaggcgaggtaccacgagtgcctgcggaaccacgcggcggcgctgggcggccacgtcgtcgacggctgcggggagttcatgcccggggacggcgacagtctcaagtgcgccgcatgcggctgccaccgcagcttccaccgcaaggacgacgcgcgccgccgccaccaccaactcatgctcccggcgaccgcgacgtcctctcgcgtcccgctgctcctgcctccgccccacccgcactacgcgccgccgccgttcccgtaccacggcacgcccagcggcggcggcggcggcaccgccaccgagtcgtccagcgaggagcgcggcccgccgtccggggccgccgccgtgcaggcgcagggccacgtccggcggaagcggttccggaccaagttcacgccggagcagaaggagcagatgctggcgttcgcggagcgcctcggctggcggttgcagaagcaggacgacgcgctggtgcagcacttctgcgaccaggtcggcgtgcgccgccaggtattcaaggtctggatgcacaacaacaagcacaccggcaggaggcagcagccgcacctgccgccgccgcaggggcagcaacagccccaacagcagccgaagtag

SEQ ID NO: 224 - protein, 242 aa, Zea mays
  ref <308>: DATABASE ACCESSION NUMBER: GRMZM2G414844
MEFRGQEEEEQPVSEEMGASSAPSSAPTPAPGNQDHAAEARYHECLRNHAAALGGHVVDGCGEFMPGDGDSLKCAACGCHRSFHRKDDARRRHHQLMLPATATSSRVPLLLPPPHPHYAPPPFPYHGTPSGGGGGTATESSSEERGPPSGAAAVQAQGHVRRKRFRTKFTPEQKEQMLAFAERLGWRLQKQDDALVQHFCDQVGVRRQVFKVWMHNNKHTGRRQQPHLPPPQGQQQPQQQPK

SEQ ID NO: 225 - DNA, 2886 bp, Zea mays
  ref <308>: DATABASE ACCESSION NUMBER: GRMZM2G138421
atggaggccgccaggtttggcacccagagcagccacttgtacggcggtgggcttgacctcaacaggcgcgagaagagggtgtttggctgggacctcaacgactggagctgggacagtcagcgctttgttgcgacgccggtgcagcagcaggcggcgaatggctctggactgaacagctcaccatcgtcgtccgaggaagccgtggaagaggtggctaggaatggtggcttcagaggtgacactgacaagaggaaaagggtcatcgatgatgacgaaaccgaggatcagtgcacggtcttgcatggtggcaggtcgctcagcttgaaaattgggggtgctgctggtggtgttggagcgatggagaacagcgatgtaaacgaggataatgagagaaatggaaagaaggtcagggtacaaggaggcagctcaagtgggccggcgtgccaggttgaggactgcggagcggatctggctgcagaaaaggattaccaccgccgacacaaggtttgcgagaagcatgctaaggccagcaccgccgtggtcgggaacactgtccagaggttctgccagcaatgtagtaggtttcaccttcttcatgaattcgatgaagggaggcgaagttgccggcgacgcttagcaggccacaatagacgcaggaggaaaacccggcctgatactgcaattggtgggactgcttcaattgaggacaaagtcagcaattatttattgttgagtcttatcggaatctgtgctaatatgaactctgacaatgctcagaatgcaaacggccaggagttgctatccactcttttgaagaacctaggatctgttgccaaatcactggagccaaaagaactatgtaaattcctggaggcataccaaagcctgcaaaatggattgaatgctggaacctctggaatagctaatggtgcagaagaggctgcaggaccatctaactctaagttgccttctgtgaatgatagtcattatggacaggcatcatcatctgttgtgccagtacaatcgaaggctaccacggtggtaactccagagcctgcatcatgcaagcttaaagattttgatctgaatgacacttgcattgatatggaaggctttgaggatgggcaagaaggttcacctacacctgcctttaagacagctgactctcctaattgtgcatcatggatgcagcaagattctactcaaagcccaccacagactagtggcaactcagattcaacatcaacacaatcattgtcaagctcaaatggagacactcagtgccgaactgataagattgtcttcaagcttttcgataaagttcccagtgacttacctccagttttgcggtcgcagattcttggttggttgtcgagtagcccatctgatatagaaagccatattagtcctggctgtattattctaactgtatatgttcggttagttgagtctgcatggcaagagctttctgagaatatgagcctgctcctgggtaagcttttgaatagctccactgacgacttttgggcatctggcttggtatttgtgatggttcggcaccacttagcttttatgctcaatggtcaaattatgttggacaggcctctggcacccagttctcatcattactgcaagattttatgtgtcagacctgttgctgcaccttattctgcaacaataaatttcagggtagaaggttttaacctactcagtacttcctcaaggctaatttgttcttttgaaggacactgcatattccatgaagacacggattctggagcagagaatgttgagtacaaggatagggacatcgaatgcctcagtttttgttgttctgttcctggtccaagaggaagaggatttatagaggtcgaagatagtggttttagcaatggcttcttccccttcataattgctgagaaggatgtatgcgctgaggtttctgagctggagagcatatttgagtcatccagtaatgaacatgcaaatgccagggaccaagctctggagtttctaaatgagctgggttggcttcttcatagagcgaacagaatgtctaaagaggatgaaactgacacatctctagctccctttaacatgtggagattcagaaatctcggtgtatttgccatggagcgggagtggtgtgccgtgatcaaaatgctgttagatttcttatttattggccttgttgatgtgggatctcggtctgcagaagagatggtgctttcagaaaatctgttgcatgctgctgtacggaggaagtctgttaacatggttagatttctgctgagatacaaaccaaataaaaactcgaagggaactgcacaggcatacttatttagacctgatgctctgggcccttcaaagattacccccctccatatagcagctgccactagtgatgcagaggatgtgttggacgcgcttacccatgatcctggactgattggaattagtgcttggagcaatgcacgggacgaaacaggttttaccccagaagactatgctcggcagagaggcaatggcgcttacctgaatctggtccaaaagaagattgataagcatcttggcgaaggccacgttgtcctcggtgttccgagcagtatatgccctgtaataaccgatggcgttaagcctggcgatgttagcctcgagatatgcagggcaatgtctgcatcagtgccaggttgcctcctctgcagccgtcaggcacggatgcatccaagttctacggcaaggaccttcctttataggccagcaatgttaactgtgatgggagtcgctgtggtttgtgtctgcgtgggcatactcctccacacctttcccagggtttatgccgcgcccacattcagatgggagctgctggagcgtggacccatgtaa

SEQ ID NO: 226 - protein, 961 aa, Zea mays
  ref <308>: DATABASE ACCESSION NUMBER: GRMZM2G138421
MEAARFGTQSSHLYGGGLDLNRREKRVFGWDLNDWSWDSQRFVATPVQQQAANGSGLNSSPSSSEEAVEEVARNGGFRGDTDKRKRVIDDDETEDQCTVLHGGRSLSLKIGGAAGGVGAMENSDVNEDNERNGKKVRVQGGSSSGPACQVEDCGADLAAEKDYHRRHKVCEKHAKASTAVVGNTVQRFCQQCSRFHLLHEFDEGRRSCRRRLAGHNRRRRKTRPDTAIGGTASIEDKVSNYLLLSLIGICANMNSDNAQNANGQELLSTLLKNLGSVAKSLEPKELCKFLEAYQSLQNGLNAGTSGIANGAEEAAGPSNSKLPSVNDSHYGQASSSVVPVQSKATTVVTPEPASCKLKDFDLNDTCIDMEGFEDGQEGSPTPAFKTADSPNCASWMQQDSTQSPPQTSGNSDSTSTQSLSSSNGDTQCRTDKIVFKLFDKVPSDLPPVLRSQILGWLSSSPSDIESHISPGCIILTVYVRLVESAWQELSENMSLLLGKLLNSSTDDFWASGLVFVMVRHHLAFMLNGQIMLDRPLAPSSHHYCKILCVRPVAAPYSATINFRVEGFNLLSTSSRLICSFEGHCIFHEDTDSGAENVEYKDRDIECLSFCCSVPGPRGRGFIEVEDSGFSNGFFPFIIAEKDVCAEVSELESIFESSSNEHANARDQALEFLNELGWLLHRANRMSKEDETDTSLAPFNMWRFRNLGVFAMEREWCAVIKMLLDFLFIGLVDVGSRSAEEMVLSENLLHAAVRRKSVNMVRFLLRYKPNKNSKGTAQAYLFRPDALGPSKITPLHIAAATSDAEDVLDALTHDPGLIGISAWSNARDETGFTPEDYARQRGNGAYLNLVQKKIDKHLGEGHVVLGVPSSICPVITDGVKPGDVSLEICRAMSASVPGCLLCSRQARMHPSSTARTFLYRPAMLTVMGVAVVCVCVGILLHTFPRVYAAPTFRWELLERGPM

SEQ ID NO: 227 - DNA, 1002 bp, Zea mays
  ref <308>: DATABASE ACCESSION NUMBER: GRMZM2G127537
atggagttggcgctcagcttgggggagaccatggcggatgccgggagggacctcatgctggggcttgggatgggggtcggggtgcggagggaggaggaagcgcagagagggaggagggacagggaggtgaggcgggagctggagttcacggcgaggagcgcccggtcgtcgccggagccggcggtgcgactcaccctcctgcacggcctcggcctcccgtggccgccgccgccgtcgtccgagaccaaccggcacctggaggcgtcggcgcgtggcttcgacgtgaaccgggcgccgtcgctgtccgcggccggtggcgccgcggaggaggacgaggagcaggacgaggcggcggcggcggcggcatcgtcgtcgcccaacaacagcgcgagctccttcccgacggacttctccgcgcagggccaggtggcgcccggcgccgaccgcgcgtgctcccgcgccagcgacgaggacgacggcggctccgcgcgcaagaagctgcgcctctccaaggagcagtccgcgttcctggaggatagcttcaaggagcacgccacgctgaacccgaagcagaagctcgcgctggcgaagcagctcaacctccggccgcgccaggtggaggtgtggttccagaaccgcagagccaggacgaagctgaagcagacggaggtggactgcgagtacctcaagcgatgctgcgagacgctgacggaggagaaccggcggctgcagaaggagctatccgagctccgcgcgctcaagacggtgcaccccttctacatgcacctcccggccaccaccctttccatgtgcccctcctgcgagcgcgtcgcctccaactccgcgccggcgcccgcgtcatcgccgtcccccgctactggcattgcggccccggcaccggagcagaggccctcgtcgttcgcggctctgttctcgtcccctctgaaccgcccgctggccgcccaggcgcaaccgcaaccgcaggcgccggccaactcgtga

SEQ ID NO: 228 - protein, 333 aa, Zea mays
  ref <308>: DATABASE ACCESSION NUMBER: GRMZM2G127537
MELALSLGETMADAGRDLMLGLGMGVGVRREEEAQRGRRDREVRRELEFTARSARSSPEPAVRLTLLHGLGLPWPPPPSSETNRHLEASARGFDVNRAPSLSAAGGAAEEDEEQDEAAAAAASSSPNNSASSFPTDFSAQGQVAPGADRACSRASDEDDGGSARKKLRLSKEQSAFLEDSFKEHATLNPKQKLALAKQLNLRPRQVEVWFQNRRARTKLKQTEVDCEYLKRCCETLTEENRRLQKELSELRALKTVHPFYMHLPATTLSMCPSCERVASNSAPAPASSPSPATGIAAPAPEQRPSSFAALFSSPLNRPLAAQAQPQPQAPANS

SEQ ID NO: 229 - DNA, 897 bp, Zea mays
  ref <308>: DATABASE ACCESSION NUMBER: GRMZM2G123876
atgaatcccctcacgcaggtgaagcggacgcagattatcaaccagaaggaggcgctcctgggcatcggcgaggacgcgtcgtggcacgccaagtttaaggactcggcctacgtctacgtcggcggcgtccccttcgacctcaccgagggcgacctcctcgccatctttgcgcagtatggtgaggttgtcgacgtgaacctcgtgcgcgacaagggcaccggaaaatccaaggggttcgcgttcctcgcgtacgaggaccagagaagcacgattcttgctgttgacaatttgaatggagctaaagttcttgggaggatcataaaggttgaccatgtgagcaagtacaagaagaaggaagaggaagatgaggaggagctgcagaagaagagggaggcccgtggagtctgctatgctttccagaaaggcgagtgcaaccgcggagcttcctgcagatattcacatgatgagcagagaaatgcaaacaccggttggggttctaaagaggatagtggtgcacgatgggagcatgacaaacacagtgatgtaccgaagagtcgaggcatgtgctatgctttccagaagggagagtgcaaccgtggagcatcctgcaaatttttgcatgacgagcagagaaatgcaaacagtcgtcgggactctagggatggtggaccatcgagatcagagcggtatggagaccgagaatctaggagtaggcatgatgatagaagagcagaagatcgggacagattcaggcgtgacaactcacctgagagatcacgaggtgagaggcagagggacgatgacagatccgacagaggaagagaagcaaaatcagaaagacgcagatatgatgtggaacatgaggatcgcaagcggtcaaggcacggcagagagtga

SEQ ID NO: 230 - protein, 298 aa, Zea mays
  ref <308>: DATABASE ACCESSION NUMBER: GRMZM2G123876
MNPLTQVKRTQIINQKEALLGIGEDASWHAKFKDSAYVYVGGVPFDLTEGDLLAIFAQYGEVVDVNLVRDKGTGKSKGFAFLAYEDQRSTILAVDNLNGAKVLGRIIKVDHVSKYKKKEEEDEEELQKKREARGVCYAFQKGECNRGASCRYSHDEQRNANTGWGSKEDSGARWEHDKHSDVPKSRGMCYAFQKGECNRGASCKFLHDEQRNANSRRDSRDGGPSRSERYGDRESRSRHDDRRAEDRDRFRRDNSPERSRGERQRDDDRSDRGREAKSERRRYDVEHEDRKRSRHGRE

SEQ ID NO: 231 - DNA, 1059 bp, Zea mays
  ref <308>: DATABASE ACCESSION NUMBER: GRMZM2G161544
atggggtgcgcgcagggcaagtgctgcctacggcggcacccgaggaggggctccgccgctgccgccgttggcggcggcgccacgctcggccgcgccgcggtgcccggggccgggctggtactggagtacgccgcgctggctgtggcggggctgtacccggactccacagcccgggagtcccaggacgcgcaccttgtcgccacgcgcttcgcgggggacccggacctccacctcttcgctgtcttcgacggtcatggcactgccggcaccgcctgcgctgggttcgcgcgggacgcgctcccgcgcctcctcgcgtcgctctccctcgccagcgccgccgaccccaccgcggcgttccgcgaggccatgctgggcgccaacgccgagatgcacgcggctcccgaggtcgacgactccatgagcgggaccaccgccgtggccgccctcgtctccggcggcgctctccacgtcgccaacgtcggcgactcgcgcgccgtcgccggggtctggcgcgccggccgcgtcgtcgccgaggacctctcctgggaccagactccgttccgcgccgacgagcgcgagcgcgtcagggcctgcggtgcccgggtcatgtccgtcgaacaggtggagggcatgcgcgatccggaggccgagcgctgggcgcccgacgagggggacccgccccgcgtctgggcgcgcgacggcctctaccccggcacagccttcacgcgcagcctcggtgacctcgccgccgaggccatcggggtcatcgccgagccggaggtcaagagcgtcgagatcactccatcgcacctcttcttcgttgtcgccagcgatggcgtgttcgagttcctctccagccaggaagttgttgacagggttgccacgtatcaagatcctcgagatgcctgctcagcaatcgctgcagagtcatacaaactatggctggagcacgaaaataggacagatgatataacgataatcattgtgcatatccgagacatggaaagtgccctgcagggagtgacaaagcggactacggtagcgtgggagcgtcaatag

SEQ ID NO: 232 - protein, 352 aa, Zea mays
  ref <308>: DATABASE ACCESSION NUMBER: GRMZM2G161544
MGCAQGKCCLRRHPRRGSAAAAVGGGATLGRAAVPGAGLVLEYAALAVAGLYPDSTARESQDAHLVATRFAGDPDLHLFAVFDGHGTAGTACAGFARDALPRLLASLSLASAADPTAAFREAMLGANAEMHAAPEVDDSMSGTTAVAALVSGGALHVANVGDSRAVAGVWRAGRVVAEDLSWDQTPFRADERERVRACGARVMSVEQVEGMRDPEAERWAPDEGDPPRVWARDGLYPGTAFTRSLGDLAAEAIGVIAEPEVKSVEITPSHLFFVVASDGVFEFLSSQEVVDRVATYQDPRDACSAIAAESYKLWLEHENRTDDITIIIVHIRDMESALQGVTKRTTVAWERQ

SEQ ID NO: 233 - DNA, 2190 bp, Zea mays
  ref <308>: DATABASE ACCESSION NUMBER: GRMZM2G027972
atggatgattggatgcttccctcacccagcccaagaacactgatgccaagcttcttcagtgaagagttcatctccactccgttctccaacatcttcgctgacgatagaggcagcaaaccccaggatgaaaacgaggacagtaacacctgcattggttccggtgctcacgaaacctctcaagatgtgaaatgccatcgtccacagatcgaatcgaacatttttggcgtgaatcagaaaccgacctctcctggaggtcttgcggagaggatagctgcaagagccggttttggtgtcctgaaaattgacatatcccgtgtcggttcatctggtgcggcgattcggtctcccgtgacaattccatctggtgtgagcccaagggaacttcttgagtcgccggttttccttccaaatgccatttcgcaaccttctcctaccactggtaaattgccattcctgatgcctaataattttaaatcaacaatgctgtgtggccccgagaagtctgaagaccacttacacgaagattctgcgttttccttccagccctttttgaggtctaaaccaccaacattatggactgcaaagaaggggccaagtgttgttcacgaaaccgggtccttatcaaaggatagccaggaggagctaaaccttcatgctaacccagcagctgcgaccgagcatgaaaccgaggaaagtctagttattagacctaaggcatgtgattccatgttcgacaatggtcatccttcttcccctgacgaaggaccagaacagagcgaggaaaaccaaaaccgggaagattgttcagctccggtcactgcccccggcgaggatggatacaactggagaaaatatggacaaaagcaggtgaagaacagtgagcatccaaggagctactacaaatgcactcacccaagttgccctgtcaagaaaaaggtggagcgttctgtagaaggtcatgtaacggagatagtttacagaggttcgcatactcacccactgccgctgcccagccgccggtcgagcgtccctcccacgcagctcgagtgtggttcacaatctgatggtctggagaacttgagctccaagcctgggcctgcctatcactcagcagcttcacaatcacagggaattgctccagatggccagttccaagatgtgcatagggaagctcttgaaacaaaactgtctggctctcttactacaactgagattgctgacaggcccgttatggatgtctcatcaacactctcctccaatgagaatggtgatagggcagttcctccaaccaatggcaggaacgaagatgagaccgaatctaaaagaaggaaaatggaggcatctgccgctactaacactaccaccaacactggcattgacatggcggctatggcatccagggcttcccgtgagccccggattgtcgtgcaaacgacgagtgaggtcgacatccttgacgatggctaccgctggcgcaagtatggccagaaagttgtgaaaggcaacccgaacccaaggtcagtgccatttctgtatcaagaaaccaaccaagtggaatttccagttgctgaacgcacgcacgcacgcacccgcacccttcttctacctgcacgcaggagctactacaagtgcacctacgcgggctgctcggtgcgcaagcatgtcgagagggcctcgaacgatctcaagtccgtgatcacgacgtacgaggggaagcacaaccacgaggttccagctgccaggaacagcggcaacgggcatccgagctctggctccacaccagcaccaccacaggggagcggcggccttcaccggaggctggagccgccacaggtcagcatccctcggttgagcgctgctgctgccgccgccgccgccgccgctgcctacggctcgctctcgcttcgtttcccaccacagctcagcgcagctcccgggggtttctccttcggaatgctccgtcccactggcatggcaccgtctctgggcggcttcttgccagcgcagatgccaggccgtgggttgccgatgcagggctgcgcgggcctggtgctgccgagaggcgaggcgaaggtggtgagcccagagcagcagtccggattgccggtggcgaacgggaatgccgcggcaacctaccagcagcagcagcagcagctcatggccaggtgggctcagggtcatcagatgtga

SEQ ID NO: 234 - protein, 729 aa, Zea mays
  ref <308>: DATABASE ACCESSION NUMBER: GRMZM2G027972
MDDWMLPSPSPRTLMPSFFSEEFISTPFSNIFADDRGSKPQDENEDSNTCIGSGAHETSQDVKCHRPQIESNIFGVNQKPTSPGGLAERIAARAGFGVLKIDISRVGSSGAAIRSPVTIPSGVSPRELLESPVFLPNAISQPSPTTGKLPFLMPNNFKSTMLCGPEKSEDHLHEDSAFSFQPFLRSKPPTLWTAKKGPSVVHETGSLSKDSQEELNLHANPAAATEHETEESLVIRPKACDSMFDNGHPSSPDEGPEQSEENQNREDCSAPVTAPGEDGYNWRKYGQKQVKNSEHPRSYYKCTHPSCPVKKKVERSVEGHVTEIVYRGSHTHPLPLPSRRSSVPPTQLECGSQSDGLENLSSKPGPAYHSAASQSQGIAPDGQFQDVHREALETKLSGSLTTTEIADRPVMDVSSTLSSNENGDRAVPPTNGRNEDETESKRRKMEASAATNTTTNTGIDMAAMASRASREPRIVVQTTSEVDILDDGYRWRKYGQKVVKGNPNPRSVPFLYQETNQVEFPVAERTHARTRTLLLPARRSYYKCTYAGCSVRKHVERASNDLKSVITTYEGKHNHEVPAARNSGNGHPSSGSTPAPPQGSGGLHRRLEPPQVSIPRLSAAAAAAAAAAAYGSLSLRFPPQLSAAPGGFSFGMLRPTGMAPSLGGFLPAQMPGRGLPMQGCAGLVLPRGEAKVVSPEQQSGLPVANGNAAATYQQQQQQLMARWAQGHQM

SEQ ID NO: 235 - DNA, 1377 bp, Zea mays
  ref <308>: DATABASE ACCESSION NUMBER: GRMZM2G124495
atgaacgccaagaagattaagctgcacgactatcaccactgctacggatcgccgatgtgtgacccacagctgttcccgcgcgccgccgccgccaccaccgcagggctctccttgcacccggggccggggctcgtgggctccctgccgcagcggcatggcggcggcggcggcggctgggtgcacgaggagcacaccgcgacgaccccgagggcggcgcaggggcagggcggctgcgtcgtcggctccgacgccgccgcgttcttcgccgccgaggagctcatgatgggcacggcgcggttcgactcccctctcggcggaacgacgacggcactccaggagctgacagcgtttgccaagggaccgccgtttggccggccgaggcccacgacggggggcgagcgcgagcgcgagcggctgtacccagtggacccgctgccgctccgcgactgcgcggcggtgaggacgtactacgtccggccgcagcagcgcgacggcgccacggaggcgcctccttcactcgagctgccattccagcggcggcagcagcaacaagtgcacgggctattcggcgacccttccaccggcaggctactcggcggcggcgagcctcaagctcactcctttccagctcacaccctgaagcaggttccggcgagcacgtttgtccccgcgatggaggcgccgccgggcatgcagagccttatggacaacccgctgtccaggagctgcagtatcatcggtgcggcggcgacccacgcagggagcggtaacgccgccgcgccggggcaaggtgctcccagcaagacgcggattcggtggacgcaggacctccacgagcgcttcgtcgactgcgtcaacaagctcggcggcgcggacaaggcgactcccaagggcattctgaagctgatgaactctgatggcctcacaatctaccacatcaagagccaccttcagaaataccgcatagccaagtacatgcccgtgtcatcgacgtccgaagggaaagagaaacgagctgctgccgccaatgacgtgcagaatctcgaccccggcaccgggatgaagatcacggaagcgctacgcgtccagctcgacgtgcagaggcgcctccacgagcagctcgagatccagaggaatctgcagctgaggatcgaggcgcaaggcaagaagctgcagaagatgttcgaggagcagatgaagacgagcaggaccgtgatggggccgccgcagggcgccgacgtcgccttcatcggcgccggcgagcaggaggaggaggtggaggtggaggacgcgttcgacgacgtgcagctactggcggccgtgtccagcgccagcgtcggctaccgcgacggcggattccagtcgaagataagctag

SEQ ID NO: 236 - protein, 458 aa, Zea mays
  ref <308>: DATABASE ACCESSION NUMBER: GRMZM2G124495
MNAKKIKLHDYHHCYGSPMCDPQLFPRAAAATTAGLSLHPGPGLVGSLPQRHGGGGGGWVHEEHTATTPRAAQGQGGCVVGSDAAAFFAAEELMMGTARFDSPLGGTTTALQELTAFAKGPPFGRPRPTTGGERERERLYPVDPLPLRDCAAVRTYYVRPQQRDGATEAPPSLELPFQRRQQQQVHGLFGDPSTGRLLGGGEPQAHSFPAHTLKQVPASTFVPAMEAPPGMQSLMDNPLSRSCSIIGAAATHAGSGNAAAPGQGAPSKTRIRWTQDLHERFVDCVNKLGGADKATPKGILKLMNSDGLTIYHIKSHLQKYRIAKYMPVSSTSEGKEKRAAAANDVQNLDPGTGMKITEALRVQLDVQRRLHEQLEIQRNLQLRIEAQGKKLQKMFEEQMKTSRTVMGPPQGADVAFIGAGEQEEEVEVEDAFDDVQLLAAVSSASVGYRDGGFQSKIS

SEQ ID NO: 237 - DNA, 1149 bp, Zea mays
  ref <308>: DATABASE ACCESSION NUMBER: GRMZM2G040452
atggggatctgcgcgtcgtccaagcgcgtggagcaggaggaggaggactcggacgagaacgtggtgtacgtggtgatggacgggcagggcggcggcggtggagggggatggggaggggacggccgtggcgcggcgtgggagcggacggtggccgcctccctcttctcgcagaagggcaagaaggggcccaaccaggacgccgtcatcctctgccagggattcggcatggaggacggtgtgttctgcggcgtgttcgacgggcacggccgctgcgggcagctggtcagcaagctggcgagggaccacctccccttcatgatcctgagccagcggaacgcgctgctcctgggctccgacgacgacggcgacggcccggccttcagcgacgcatcgcccgcggcgtcgtcgtccacggacggcagccgcagcgagcggtcgtcgccggcgccggcgcagatgctggaggagtggcgggaggcctgcgccaacgcgttcgaggccatggacagggagctcggggtccaggctaaggtggactgcgacttcagcggcaccacggccgtgtgcgccatcaagcagggggaggacctcgtcgtcgccaacctcggcgactccagggccgtgctggcgaccgtgtcggagacgggctacctgaaggccgtgcagctcaccaccgaccagaagcccaacgtgcctcaggaggctgagcgcatcaagcgctgcaacgggcgcgtgttcgcgctcaaggacgaggcgtcggtgcctcgcgtgtggctgcccgacgaggactgcccgggcctggccatggcgcggtcgctgggcgaccaccgcctcaagcggcacggcgtggtgtcggagccggaggtggcgcaccgccgcgtcgcgccgggggacctgttcctcgtcctggccacggacggcgtgtgggacgtgctcagcaaccaggaggtggtgtccatcgtctgcgccacgccaaggaagcagcacgcctccaaggccgtcgcccaggccgcggcgcagcgctggcggaccaggtacccggcgtcccgcgtcgacgactgctccgccgcctgcctcttcctgcgggaccaggactgggccaccagcgtcgccgccgcgcccaaggcgaaggcggccgctagccgctag

SEQ ID NO: 238 - protein, 382 aa, Zea mays
  ref <308>: DATABASE ACCESSION NUMBER: GRMZM2G040452
MGICASSKRVEQEEEDSDENVVYVVMDGQGGGGGGGWGGDGRGAAWERTVAASLFSQKGKKGPNQDAVILCQGFGMEDGVFCGVFDGHGRCGQLVSKLARDHLPFMILSQRNALLLGSDDDGDGPAFSDASPAASSSTDGSRSERSSPAPAQMLEEWREACANAFEAMDRELGVQAKVDCDFSGTTAVCAIKQGEDLVVANLGDSRAVLATVSETGYLKAVQLTTDQKPNVPQEAERIKRCNGRVFALKDEASVPRVWLPDEDCPGLAMARSLGDHRLKRHGVVSEPEVAHRRVAPGDLFLVLATDGVWDVLSNQEVVSIVCATPRKQHASKAVAQAAAQRWRTRYPASRVDDCSAACLFLRDQDWATSVAAAPKAKAAASR

SEQ ID NO: 239 - DNA, 732 bp, Oryza sativa
  ref <308>: DATABASE ACCESSION NUMBER: LOC_Os05g38140
atgagctgcgggggcgccgggcagagcgggtggctgctcgagtacgggctggtggaggaggagatccagggctccgacttcatctacatggtcgacgaccccgcggccgtctccagcgtgctactgggcttcgacgttcccaggaaggaggacggcagcggcggccaggacaactctgcctccaagaaaagatctcgtccagaatcgagcgcaccgccgggcaccaaggcttgccgcgaaaagctccggcgagacaggctcaatgaaaggttcaacgagctcagcgcgatcttggagcccggcaagccgccgagggccgacaaggtctccatcctgagcgacgccgcccgtctcctgagccagctgcgcgccgaggcccagaagctcaagagctcgaacgagtcgctccaggactccatcaagagcctcaaggccgagaagtcggagctgcgtgacgagaagacgaggctcaaggccgagagggagaggctggagcaaatgctcaagggcgtcggcgccgccacaccggcggctccagcgccgttcgtcccgcaccacgccgcggcggtggcggccgcaccggcgtaccatccggcggcgttcgcgcaggccggcggcaagtacgtgccgtacgccaccagctacgcgccgccggccgcgttctggcagtggataccgccgacgtccctcgacacgtccaaggaccccgtgatgtggccgccggttgcatga

SEQ ID NO: 240 - protein, 243 aa, Oryza sativa
  ref <308>: DATABASE ACCESSION NUMBER: LOC_Os05g38140
MSCGGAGQSGWLLEYGLVEEEIQGSDFIYMVDDPAAVSSVLLGFDVPRKEDGSGGQDNSASKKRSRPESSAPPGTKACREKLRRDRLNERFNELSAILEPGKPPRADKVSILSDAARLLSQLRAEAQKLKSSNESLQDSIKSLKAEKSELRDEKTRLKAERERLEQMLKGVGAATPAAPAPFVPHHAAAVAAAPAYHPAAFAQAGGKYVPYATSYAPPAAFWQWIPPTSLDTSKDPVMWPPVA

SEQ ID NO: 241 - DNA, 924 bp, Oryza sativa
  ref <308>: DATABASE ACCESSION NUMBER: LOC_Os01g55750
atgatactaggaagcaaccaagcggccgccgccgcggctgcggcagctgcggcggaggaggaggcggcggagctagcgaggaagcacacggcggcggtggcgacgtcgcggcaatggtcggcgcagacggagtcgcggatcgtgcgcgtgtcgcgggtgttcggcggcaaggaccggcacagcaaggtgaagacggtgaaggggctgcgcgaccggcgggtgcggctgtcggtgccgacggcgatccagctgtacgacctgcaggaccggctggggctcaaccagcccagcaaggtggtggactggctgctcaacgcggcgcgccacgagatcgacaagctgccgccgctgcagttcccgccgcaggaccacctctgcatgggacaccaccaccacctgccgtcggccatgccgctgatgcaccaccacggccaccaccaccacgccgacgacgataagtaccacgtcgcggcggcggcggccgcgctggccgcggagaaggaggcggcggcggccggcggcggaggaggaggagggggagacgacgtcgacggcgggggcggcggcggagcggcgcacatagtggggaggttccccgccggtggctaccaccggttcatggggctgaacaacccgctggggatggtcaacagcgccgccggcgccgccatgccgttccactacgccggtgagtcatggaataatggcagcgtgcaagacagcggcgccggctcgccgcaggtggccgccgccgcggctcaccacacctcgccgttcccttcactgctttccttggctccagggccgcatcatcagctggtgttctactcctccgaggccgagcagttcacagtagacaaccttggctcgcagggcttgtccctgagctcggcgagagctttccatgatcagacaggaagctaa

SEQ ID NO: 242 - protein, 307 aa, Oryza sativa
  ref <308>: DATABASE ACCESSION NUMBER: LOC_Os01g55750
MILGSNQAAAAAAAAAAAEEEAAELARKHTAAVATSRQWSAQTESRIVRVSRVFGGKDRHSKVKTVKGLRDRRVRLSVPTAIQLYDLQDRLGLNQPSKVVDWLLNAARHEIDKLPPLQFPPQDHLCMGHHHHLPSAMPLMHHHGHHHHADDDKYHVAAAAAALAAEKEAAAAGGGGGGGGDDVDGGGGGGAAHIVGRFPAGGYHRFMGLNNPLGMVNSAAGAAMPFHYAGESWNNGSVQDSGAGSPQVAAAAAHHTSPFPSLLSLAPGPHHQLVFYSSEAEQFTVDNLGSQGLSLSSARAFHDQTGS

SEQ ID NO: 243 - DNA, 918 bp, Oryza sativa
  ref <308>: DATABASE ACCESSION NUMBER: LOC_Os10g23090
atgaagaggcccagctgcagaggctcctccatggccatcatccatgacacctctgatcaacaagaggacaacatgaggtcgtacatggacggcggcggcgcggcggcgtacgaggaggaggaggaggaggttgaggacgacgacggcggcggcggcggcggcggcggcggcggcggtggggggctcggggagaagaagcggcggctggcggcggagcaggtgcgggcgctggagcggagcttcgaggcggacaacaagctggacccggagcggaaggcccggatcgcccgcgaccttcgcctccaccctcgccaggtcgccgtctggttccagaaccgccgcgcgaggtggaagaccaagcagatcgagcgcgacttcgccgccctccgctcccgccacgacgccctccgcctcgagtgcgacgccctccgccgcgacaaggacgccctcgccgccgagatcgccgacctccgggacagggtggacggccagatgtccgtcaagctggaggccgtggccgcggacgaacaccagccgcctccgccgccgccgccgccgccactggcgtataacagcaaggtggtggacggctcgacggacagcgactcgagcgcggtgttcaacgaggaggcgtcgccgtactccggcgcggccatcgaccaccaccaccaccaaactccggcgagctacgacacggcggggttcacctccttcttcgcgccatccaccacgctcacctcgtccctctccttcccttccatgttccacgcgtcatcgcatttcgatggccaccaagaactcctcgtcggcggcggcggcgccggcgcagtggccgacgccgacctcggaggcgccggattcttcgccggcgacgagcacgccggcggcctctcctggtacggcgccgagggttggtag

SEQ ID NO: 244 - protein, 305 aa, Oryza sativa
  ref <308>: DATABASE ACCESSION NUMBER: LOC_Os10g23090
MKRPSCRGSSMAIIHDTSDQQEDNMRSYMDGGGAAAYEEEEEEVEDDDGGGGGGGGGGGGGLGEKKRRLAAEQVRALERSFEADNKLDPERKARIARDLRLHPRQVAVWFQNRRARWKTKQIERDFAALRSRHDALRLECDALRRDKDALAAEIADLRDRVDGQMSVKLEAVAADEHQPPPPPPPPPLAYNSKVVDGSTDSDSSAVFNEEASPYSGAAIDHHHHQTPASYDTAGFTSFFAPSTTLTSSLSFPSMFHASSHFDGHQELLVGGGGAGAVADADLGGAGFFAGDEHAGGLSWYGAEGW

SEQ ID NO: 245 - DNA, 1266 bp, Oryza sativa
  ref <308>: DATABASE ACCESSION NUMBER: LOC_Os03g50310
atggcgagcgccgccgcggcgacgggcgcggcgctgggggcgcgcacggcgcgggcgtgcgacgggtgcatgcggcggcgggcgcggtggcactgccccgcggacgacgcgttcctgtgccaggcgtgcgacgcgtccgtgcactcggcgaacccgctggcgcggcggcaccaccgcgtgcgcctcccgtcggcgtcctcctcgccggcatcctcccctcgctcggcggccgctccacgtgccggatcagacgaccccgacgcgccggcgtggctgcatgggctcaagcggcggccgcgcacgccccggaccaagcccgggggaggcggcaagcacgacgcctccgccgcgacggtggccgcggcggcggcgtcggcggtcccggacctcgaggcggaggagtccgggatcgtgggcgacaccgaccacgacgtcggggaagaggacgacgaggacctgctgtaccgcgtccccgtgttcgaccccatgctcgccgagctctacaaccccgtggcggccgacgacgaggagcagcagatcgagcagaagcctgctgcacgcgtcgtgccgttctcggagccgtcgccggagttcgcctccggctcggtggaggcggacggcctctccggcttcgacgtgccggacatggagctcgccagcttcgcggcggacatggagagcctcctcatgggagtcgacgaggggttcgacgatctgggcttcttggacgacgagaagcctcacgtgaaactggacctggacatggacatggacttcgcctccatctcgccggcgccggcgccggagcgggaggagaggaagaggaagcggccggagatgatactcaagctcgactacgagggcgtcatcgactcgtgggcccgcgacggagcctcgccgtggttccacggcgagcgccctcgcttcgatcccagcgagtcatggccggacttcccggcgggaagccggggagggctcggcgcggcggtgacggcggtgaccggcggcgagagggaggcgcgggtgtcgcggtacagggagaagcggcggacgcggctgttcgccaagaagatccggtacgaggtgcgcaagctcaacgccgagaagcggccgcggatgaagggccggttcgtcaagcgcgccgccgcgctgccgccgctcccgctgcccaggcaccagcatccgccgccgccgccgccgcgcgctctgccgccggtgccgatgatgctcgcgccgcgcggcgcgcacgggcgctaccgtttttga

SEQ ID NO: 246 - protein, 421 aa, Oryza sativa
  ref <308>: DATABASE ACCESSION NUMBER: LOC_Os03g50310
MASAAAATGAALGARTARACDGCMRRRARWHCPADDAFLCQACDASVHSANPLARRHHRVRLPSASSSPASSPRSAAAPRAGSDDPDAPAWLHGLKRRPRTPRTKPGGGGKHDASAATVAAAAASAVPDLEAEESGIVGDTDHDVGEEDDEDLLYRVPVFDPMLAELYNPVAADDEEQQIEQKPAARVVPFSEPSPEFASGSVEADGLSGFDVPDMELASFAADMESLLMGVDEGFDDLGFLDDEKPHVKLDLDMDMDFASISPAPAPEREERKRKRPEMILKLDYEGVIDSWARDGASPWFHGERPRFDPSESWPDFPAGSRGGLGAAVTAVTGGEREARVSRYREKRRTRLFAKKIRYEVRKLNAEKRPRMKGRFVKRAAALPPLPLPRHQHPPPPPPRALPPVPMMLAPRGAHGRYRF

SEQ ID NO: 247 - DNA, 873 bp, Oryza sativa
  ref <308>: DATABASE ACCESSION NUMBER: LOC_Os09g31482
atggccgagcacctcgcttccatctttggcacggagaaggaccgcgtgaactgccccttctacttcaagatcggcgcgtgccgccatggcgaccgatgctcccgcctgcacaacaagccgtcggtctcgccgacgctgctgctctccaacatgtacctgcgtccggacatgatcacccctggaattgatgctcagggcaaccccatcgaccctgagaagatccaggccgacttcgaggatttctacgaggacatctttgaggaactcagcaagtacggcgagatcgagagcctccacgtgtgtgacaacttcgccgaccacatgatcggcaatgtgtatgttcaattcagggaggaggatcaggccgccagagcgctgcaggcgctgacggggcggtactactccggccgtcctatcattgtcgagttctcgccggtgtccgatttccgggaggccacctgccggcaatatgaagagaacagctgcaaccgtggtgggtactgcaacttcatgcacgtcaaggagatcggcagagacctgaggaagaggttgtttgggcacctgcataggtcccggagaagccatagccatggccggagccgcagcccgagcccgtaccattaccggagggactatgatcggaggagctcatcgcggtccagggaccacgacgattactaccgtggaggtagccacgattactaccgtggaggtagccggaggagcagcgagaggcaccgcagcagctacgacagcgatggcagcaggcggcggcacaggtccaggactaggagtcctgtcagggatggtagcgaggagaggagagctcaaattgagcagtggaaccgtgaaagggaggctgcacaagtgtga

SEQ ID NO: 248 - protein, 290 aa, Oryza sativa
  ref <308>: DATABASE ACCESSION NUMBER: LOC_Os09g31482
MAEHLASIFGTEKDRVNCPFYFKIGACRHGDRCSRLHNKPSVSPTLLLSNMYLRPDMITPGIDAQGNPIDPEKIQADFEDFYEDIFEELSKYGEIESLHVCDNFADHMIGNVYVQFREEDQAARALQALTGRYYSGRPIIVEFSPVSDFREATCRQYEENSCNRGGYCNFMHVKEIGRDLRKRLFGHLHRSRRSHSHGRSRSPSPYHYRRDYDRRSSSRSRDHDDYYRGGSHDYYRGGSRRSSERHRSSYDSDGSRRRHRSRTRSPVRDGSEERRAQIEQWNREREAAQV

SEQ ID NO: 249 - DNA, 1002 bp, Oryza sativa
  ref <308>: DATABASE ACCESSION NUMBER: LOC_Os12g41680
atgtcgatgatgagcttcttgagcatggtggaggcggagctgccgccggggttcaggttccacccgagggacgacgagctcatctgcgactacctggcgcccaaggtcgccggcaaggtcggcttctccggccgccgcccgcccatggtcgacgtcgacctcaacaaggtcgagccatgggacctccccgaggtggcgtcggtgggcggaaaggagtggtacttcttcagcctgagggaccgaaaatacgcgacggggcagcgtacgaaccgagccacggtttcggggtactggaaggccacggggaaggacagggtggtggcacgaagaggggcacttgtggggatgaggaagacactggtgttctaccaggggagggcacccaagggaaggaagacagagtgggtgatgcatgagtacaggatggagggtgtgcatgatcaacaagcttccagcttctcctccaaggaagactgggtcctgtgcagagtcatctgcaagaggaaatcaggagggggtgcaacctccaagtcaagaagcctcaccaccaccaccaccaccattgtccatgacacatccacaccaacctcctcaccaccattgccacccctcatggacaccaccctagctcagctccaggcctccatgaacacctcctcctcctccgccatcgccgccgtcgccgcacttgagcaagtgccctgcttctccagcttcagcaacagcattgccagtaacaacaacaacagcaacagtgctactgtcaatgcacagcaatgctacctgccaattgtcacaggtagcaacaacaatggcatgagctacctggatcatggcctgcctgaatttggcagcttcttggacacccagagctgtgacaagaagatgctcaaggcagtgctgagccagctcaactccattgggggtgaggtgttgccaggcctgcctcctccatctgaaatggctgctgctgtcagctcttcttggatgaatcacttctag

SEQ ID NO: 250 - protein, 333 aa, Oryza sativa
  ref <308>: DATABASE ACCESSION NUMBER: LOC_Os12g41680
MSMMSFLSMVEAELPPGFRFHPRDDELICDYLAPKVAGKVGFSGRRPPMVDVDLNKVEPWDLPEVASVGGKEWYFFSLRDRKYATGQRTNRATVSGYWKATGKDRVVARRGALVGMRKTLVFYQGRAPKGRKTEWVMHEYRMEGVHDQQASSFSSKEDWVLCRVICKRKSGGGATSKSRSLTTTTTTIVHDTSTPTSSPPLPPLMDTTLAQLQASMNTSSSSAIAAVAALEQVPCFSSFSNSIASNNNNSNSATVNAQQCYLPIVTGSNNNGMSYLDHGLPEFGSFLDTQSCDKKMLKAVLSQLNSIGGEVLPGLPPPSEMAAAVSSSWMNHF

SEQ ID NO: 251 - DNA, 945 bp, Oryza sativa
  ref <308>: DATABASE ACCESSION NUMBER: LOC_Os03g55080
atggccggagcggagtggtcgccgttcgacggggacgccgccttcgcggagtactcgtcggcggtgctggccgagctcggcgggtgggcggcgccgggcgaggaaggcggcgcggggatgatggtaccggcggcgctggatctgccggtggatgtggtgggggcggcggcgcgggaggaggaggaggaggaggaggaggcgccggcgagatcgggcgacggcgccgccgccgccgcgtcgtcgagctctagcggggagcccgccgcccccgacaagcgaccggccgccgccgaggcagcgccggcggcggcggcgacggcgacggcgacggcgaagaaggggcagaagagggcgaggcagccgcggttcgcgttcatgaccaagagcgagattgaccacctcgaggatggctacaggtggaggaagtatgggcaaaaggcggtcaagaacagcccattcccaaggagctactacaggtgcaccaacagcaagtgcactgtgaagaagcgcgtggagcggtcttccgacgacccttccgtcgtgatcaccacctacgagggccagcactgccaccacaccgcctccttccagcgcggcgtcggcggcgccgccgtcgcggcgcacatccacggcgcggcggccgtcgccctcgccgagcaaatgtcggcgttcgtctcgccgccgccacagccgcatatgctgtacggtttaccccggttgcacccgccgtcctccgagaccgccgtcagctgctcgatgccgacgacgacgtctttgcaggagctgaacaatagcgaggggctacaacgccctggctataataatagcccccaggcggcggtgaccatcgcgcagcggccgccgtcgccgtcggtgcctccggctgtttcgtttgacaaggggctacttgatgatattgtgcctcctggagttagacttggatga

SEQ ID NO: 252 - protein, 314 aa, Oryza sativa
  ref <308>: DATABASE ACCESSION NUMBER: LOC_Os03g55080
MAGAEWSPFDGDAAFAEYSSAVLAELGGWAAPGEEGGAGMMVPAALDLPVDVVGAAAREEEEEEEEAPARSGDGAAAAASSSSSGEPAAPDKRPAAAEAAPAAAATATATAKKGQKRARQPRFAFMTKSEIDHLEDGYRWRKYGQKAVKNSPFPRSYYRCTNSKCTVKKRVERSSDDPSVVITTYEGQHCHHTASFQRGVGGAAVAAHIHGAAAVALAEQMSAFVSPPPQPHMLYGLPRLHPPSSETAVSCSMPTTTSLQELNNSEGLQRPGYNNSPQAAVTIAQRPPSPSVPPAVSFDKGLLDDIVPPGVRLG

SEQ ID NO: 253 - DNA, 957 bp, Oryza sativa
  ref <308>: DATABASE ACCESSION NUMBER: LOC_Os09g13940
atgatggtgccctcttcacggaaagtccgtgttttctgctctgatcctgatgccactgactcctctgatgaagatgaccagaataagaaggaaaggagattttcaagggaaatactaattccaatggaaaactccaaggcatccaaacctgttaagacccttgttcaatgtggcacaaagactgtaaaggattccgagaaggaaccgacgagcaaatacaggggtgtgcgccggcgggcgtggggcaaatgggctgcagaaatacgtgaccctgtgcgaaaatcaaggaaatggattggcacatttaacagtgaggaggaggccgctgcggcatatcttgcacaatcaaaccagttccatgaagagttgatggccttgaaaatccaatcttctgtatcagagcaggaagatttgtcaagctctgttactatatcctgcgtgtcctcatctcagtcatgtgaccagaagattcaggcaaagccacaagaacacaagagagtgtcagtggtggttaaccgtgagaccgttgagcagaagtttaaggcacagccacaagctcagaagattaaggcacagccagaagtgcagaagagagtgtcagtgaagattagccatgagactgaggatgagcacttgctgaacttgccgtccacgcctaaaggcaaagagatttcgatgggcgctgttcttggcaggatagatgagattcctgtgagcaactgtgtgggccatattgatgaatttccacctgatgatttcactaggcttgcagatgcgttcccagttagtgattttatcggcatggcagatgtgccactgggcgatgattacattggccttgcagacatcagccacctgccgctgcctatcacagatctgaagttcgacctcaatgcagaactcaactgggacgggttcgactttgcttcattggaacaagaactcaactgtctttga

SEQ ID NO: 254 - protein, 318 aa, Oryza sativa
  ref <308>: DATABASE ACCESSION NUMBER: LOC_Os09g13940
MMVPSSRKVRVFCSDPDATDSSDEDDQNKKERRFSREILIPMENSKASKPVKTLVQCGTKTVKDSEKEPTSKYRGVRRRAWGKWAAEIRDPVRKSRKWIGTFNSEEEAAAAYLAQSNQFHEELMALKIQSSVSEQEDLSSSVTISCVSSSQSCDQKIQAKPQEHKRVSVVVNRETVEQKFKAQPQAQKIKAQPEVQKRVSVKISHETEDEHLLNLPSTPKGKEISMGAVLGRIDEIPVSNCVGHIDEFPPDDFTRLADAFPVSDFIGMADVPLGDDYIGLADISHLPLPITDLKFDLNAELNWDGFDFASLEQELNCL

SEQ ID NO: 255 - DNA, 1620 bp, Oryza sativa
  ref <308>: DATABASE ACCESSION NUMBER: LOC_Os01g13740
atgcttgaggtgtccacgctgcgaagccctaaggcggatcagcgggcgggcgtcggcggccaccatgtcgtcggcttcgtcccggcgccgccgtcgccggccgacgtcgccgacgaggtcgacgcgttcatcgtcgacgacagctgcctgctcgagtacatcgacttcagctgctgcgacgtgccgttcttccacgccgacgacggcgacatcctcccggacctcgaggtcgaccccacggagctcctcgccgagttcgccagctccccggacgacgagccgccgccgacgacgtcggctccgggccccggcgagccagctgctgctgcaggagccaaggaagacgtgaaggaagatggagccgccgccgccgccgccgccgccgccgctgactacgacgggtcgccgccgccaccgcgggggaagaagaagaaggacgacgaggaaaggtcgtcgtcgttgccggaggagaaagacgcgaagaacggcggcggcgacgaggtcctgagcgcggtgacgacggaggattcctcggccggtgccgccaagtcgtgctcgccgtcggcagagggccacagcaagaggaagccgtcgtcgtcgtcgtcatcggcggcggccggcaagaactctcacggcaagcgcaaggtgaaggtggactggacgccggagttgcaccggcggttcgtgcaggcggtggagcagctcgggatagacaaggccgtgccgtccaggatcctggagctcatgggcatcgagtgcctcactcgccacaacatcgccagccatctccagaaatatcggtcgcacaggaaacatctgatggcgagggaggcggaggcggcgagctggacgcagaagcggcagatgtacaccgccgccgccgccgccgccgcggtggcagccggcggcgggccaaggaaggacgccgccgccgccactgcggcggtggccccgtgggtcatgccgaccatcggtttccctccgccgcacgcggcggcgatggtgcctcccccgccgcaccctccaccgttctgccggccgccgctgcacgtgtggggccacccgaccgccggcgtcgagccgaccaccgcggcggcgccaccaccaccctcgccgcacgcgcagccgccgttgctgcccgtctggccgcgccacctggcgccgccgccgccgccgctgccggcggcgtgggcgcacggccaccagccggcgccggtggacccggcggcgtactggcagcaacagtataacgcggcgaggaagtggggcccgcaggcagtgacaccggggacgccgtgtatgccgccaccgttgcctccagccgccatgttgcagaggtttcctgtaccgccggtgcctggaatggtgccgcaccccatgtacagaccgataccgccgccgtcaccgccgcaggggaataaactcgctgccttgcagcttcagcttgatgcccacccgtctaaggagagcatagacgcagccatcggagatgttttagtgaagccatggctgccgcttcccctcggcctcaagccaccgtcgctggacagcgtcatgtctgagctgcacaagcagggcatccccaaggtgccaccggcggcgagcggtgccgccggctga

SEQ ID NO: 256 - protein, 539 aa, Oryza sativa
  ref <308>: DATABASE ACCESSION NUMBER: LOC_Os01g13740
MLEVSTLRSPKADQRAGVGGHHVVGFVPAPPSPADVADEVDAFIVDDSCLLEYIDFSCCDVPFFHADDGDILPDLEVDPTELLAEFASSPDDEPPPTTSAPGPGEPAAAAGAKEDVKEDGAAAAAAAAAADYDGSPPPPRGKKKKDDEERSSSLPEEKDAKNGGGDEVLSAVTTEDSSAGAAKSCSPSAEGHSKRKPSSSSSSAAAGKNSHGKRKVKVDWTPELHRRFVQAVEQLGIDKAVPSRILELMGIECLTRHNIASHLQKYRSHRKHLMAREAEAASWTQKRQMYTAAAAAAAVAAGGGPRKDAAAATAAVAPWVMPTIGFPPPHAAAMVPPPPHPPPFCRPPLHVWGHPTAGVEPTTAAAPPPPSPHAQPPLLPVWPRHLAPPPPPLPAAWAHGHQPAPVDPAAYWQQQYNAARKWGPQAVTPGTPCMPPPLPPAAMLQRFPVPPVPGMVPHPMYRPIPPPSPPQGNKLAALQLQLDAHPSKESIDAAIGDVLVKPWLPLPLGLKPPSLDSVMSELHKQGIPKVPPAASGAAG

SEQ ID NO: 257 - DNA, 1407 bp, Oryza sativa
  ref <308>: DATABASE ACCESSION NUMBER: LOC_Os02g27060
atgagcgcggcggcggaggaggcggctgcggcggcggcggcggaggaggtggagggggtggaggcggggaagaagggcgtggcggatgcgaaggggaaggggaaggagaaggtggtggtggcggaggaggattctgcggtggcggcgggctccgggggaagcggaggcgggaggaggacgttggtggcgtacccggcgcgggttgcggggtacaaggacgtggtggcggacgcggcggtcttcaggagggcgctcgaggggttgcacgcccagatggggacaaagctcaaggtgccaattattggtggaaaagaccttgatcttcatcagctgtttaaggaggtcacttcacgaggtggcattgataaggtgaagtccgataatagatggagggaagtaacagcatcatttattttccctgctactgcgacaaatgcttcttttatgttgaagaaatactacatgtcactattataccattttgagaggctatacttgtttgaggcacaaggctggtatcaagaaactgcagattccagaagcatttcctgtatagaaatgaaagctgaaggtcaagcttcccggaaaaggaaaagaggaagcaattcttgttcttcagacctagctgcttctttggataatgatgtacaagtgataattgatggtaagtttgaacatggctacatagttaccgttatcatgggctcaaaatcaacgaaagcggtactctataattgcaccgaagaacctgcagtgccaactgcggtgcctcatgttgcaattgacagcgctgagggcatacgtcctcgccgccgccgccgtaggaagaagttaagtacaacagaccccaaccatcctaaaccaaacaggagcggctacaatttcttcttccaagatcagcacaggaagctcaagccagaatatcctggacaagacaggcttatcagcaagatgattggtgaacgatggaacaatttaggccctgaagataaagcagtatatcaagaaaaaggtgtagaggacaaggcaaggtaccagagacagttagctctttacagagaacagagaacaggccagccaatcagcaacgcggtgcctatccagcagagacttcctcagaaagaagtgacgattgatgaggtggactctaaagtcagtgaaggtgatatcctgctgtccaaccaaggatacagcagcagtaccagtagcagtgatgaaaccgctgattcgggagaaaaaaatgtggaagatgatgaagagtttaacacagagacatctcctgagccgagcatggaaacaacagattctcatggacagcctgatccttctgctgatggggagcgctttgaactgcgccgcagggagaaccctaagattgatgagaaacgtgacatgccacctaattaa

SEQ ID NO: 258 - protein, 468 aa, Oryza sativa
  ref <308>: DATABASE ACCESSION NUMBER: LOC_Os02g27060
MSAAAEEAAAAAAAEEVEGVEAGKKGVADAKGKGKEKVVVAEEDSAVAAGSGGSGGGRRTLVAYPARVAGYKDVVADAAVFRRALEGLHAQMGTKLKVPIIGGKDLDLHQLFKEVTSRGGIDKVKSDNRWREVTASFIFPATATNASFMLKKYYMSLLYHFERLYLFEAQGWYQETADSRSISCIEMKAEGQASRKRKRGSNSCSSDLAASLDNDVQVIIDGKFEHGYIVTVIMGSKSTKAVLYNCTEEPAVPTAVPHVAIDSAEGIRPRRRRRRKKLSTTDPNHPKPNRSGYNFFFQDQHRKLKPEYPGQDRLISKMIGERWNNLGPEDKAVYQEKGVEDKARYQRQLALYREQRTGQPISNAVPIQQRLPQKEVTIDEVDSKVSEGDILLSNQGYSSSTSSSDETADSGEKNVEDDEEFNTETSPEPSMETTDSHGQPDPSADGERFELRRRENPKIDEKRDMPPN

SEQ ID NO: 259 - DNA, 1236 bp, Oryza sativa
  ref <308>: DATABASE ACCESSION NUMBER: LOC_Os05g40960
atgtatcaccaacatcagggtcggagtgacctcttcactactaggacatcctttccaatggagcggcatctgtttctgcatggaggaaatacacaaggagattctgggctggttctctcaactgacgctaaacctaggttgaaatggacacctgagttgcatcagcgatttgtagatgcagttaatcaattaggtggagcagagaaagctactccaaaaacagtcatgaggctcatgggcattccaggactcaccttataccatctgaaaagccatctccagaaatacaggctcagtaagaatctccaaggtcaagctaatgttgggacaacaaagaatgcccttggatgtacaggtgttgctgataggattcctggaacaagtgcattagcgatggccagtgcaagcgccattccacaggcagagaaaactattcaaatcggtgaagcactacagatgcaaattgaggtgcagaggcagctaaatgaacaacttgaggtacaacggcatctacagctgcggatagaagcccaagggaagtatctgcaggcagttcttgagcaagctcaagagacccttgggaagcagaacttgggccctgcaagcctggaagatgcaaaaataaaaatatcagaactggtctcacaagtttcaaatgaatgtctcagcaacgcagttacagaaataagagaaagttcaagtatacacagactagagccaaggcaaatccagtttgttgaaagttcagccaataactgtttgactgcagctgaaggattcaaggagcataggctacaaaaccacggggtactcaaagcatatgatgatagtacattattttgccgaaaacagtcccaagatcaagaatctcaatattcccttaacagaagcttaagtgagcgtagaatgggtcatctgtatagcggtaaacagtatcacaaatcagagggaagtgacagtgatacagaggttctacatgagtatatcacgcctcaaaagaatggcggaggcagcacaaccagttcaacatcaggaagcaaagaaataaatgtagagaagctatatcttgatgaaccaagctgcaaaagacaaacagttgactatcaaagagaaagcaagctactagattttgatcaacaaagttcagggaagaatcttgatctaaatactcacaatatagatgataacgatcaaggttatagacattttgacttgaacggcttcagctggagttga

SEQ ID NO: 260 - protein, 411 aa, Oryza sativa
  ref <308>: DATABASE ACCESSION NUMBER: LOC_Os05g40960
MYHQHQGRSDLFTTRTSFPMERHLFLHGGNTQGDSGLVLSTDAKPRLKWTPELHQRFVDAVNQLGGAEKATPKTVMRLMGIPGLTLYHLKSHLQKYRLSKNLQGQANVGTTKNALGCTGVADRIPGTSALAMASASAIPQAEKTIQIGEALQMQIEVQRQLNEQLEVQRHLQLRIEAQGKYLQAVLEQAQETLGKQNLGPASLEDAKIKISELVSQVSNECLSNAVTEIRESSSIHRLEPRQIQFVESSANNCLTAAEGFKEHRLQNHGVLKAYDDSTLFCRKQSQDQESQYSLNRSLSERRMGHLYSGKQYHKSEGSDSDTEVLHEYITPQKNGGGSTTSSTSGSKEINVEKLYLDEPSCKRQTVDYQRESKLLDFDQQSSGKNLDLNTHNIDDNDQGYRHFDLNGFSWS

SEQ ID NO: 261 - DNA, 1170 bp, Oryza sativa
  ref <308>: DATABASE ACCESSION NUMBER: LOC_Os01g37130
atggcgctgctgagcccgcgtgtgccgcggctgccgctcgcctccgcctccgccgctggagcggggctccggtgctgcgtcagcggcggcagggccgggtcggcggcgtggtgccacgcgtcggcggccggcagcgtggcgtcgtcgtcgtcggagctggaggccatccggtgggggaccgccaagctgcagggcgcgcgcgacgagatggaggacgaggtcgtcctccgccccggctccctcctcgacggcttctccttcgccgccgtcttcgacggccacgccggattctccgccgtcgagttcctcagggacgagctgtacaaggaatgcgcggcggcgttggacggcggcgcggtgctgagcaccaagaacctcgacgccatcaccgactcgatccagcgcgccttcgccaccgtcgacgccaacctctccacctggctcgagcagatggacaaggaagatgagtccggcgccacggccacggccatgttcctcaggaacgatgtccttgttgtctcgcacattggcgactcctgcttgcaggtcgtatcacgcggtgggaggcctcaagctgtgaccaacttccaccgaccgtacgggaacaagaaagcgtctcttgaagaggtgaagcggatcagagcagcaggtggatggattgttgatggacgcatatgtggagaaatttctgtgtctcgtgcttttggagacattagatttaagacacggaagaatgagatgttggtaaaaggagttaaagaagggagatggactgaaaagtttatctcacgaataaattttaaaggagatttaatagtctcttcacctgacgtatccctggtcgaacttggaccagatgtggaatttgttttgctagcaacagatggtctttgggattacattaaaagctctgaagcagtagcattagttagggatcaactacggcaacatggggatgtccaggttgcctgtgaggcacttggtcagatagctctggatcgtcggtcgcaagacaacattagtatagtcatagctgacttggggaggacaaactggaaggagctgcctgctcaaaggccaaatttattcttggagttaactcaagcagttgcaacagttggggccgtctcattagggatttatatttcatcgctccttgcgttgcagtag

SEQ ID NO: 262 - protein, 389 aa, Oryza sativa
  ref <308>: DATABASE ACCESSION NUMBER: LOC_Os01g37130
MALLSPRVPRLPLASASAAGAGLRCCVSGGRAGSAAWCHASAAGSVASSSSELEAIRWGTAKLQGARDEMEDEVVLRPGSLLDGFSFAAVFDGHAGFSAVEFLRDELYKECAAALDGGAVLSTKNLDAITDSIQRAFATVDANLSTWLEQMDKEDESGATATAMFLRNDVLVVSHIGDSCLQVVSRGGRPQAVTNFHRPYGNKKASLEEVKRIRAAGGWIVDGRICGEISVSRAFGDIRFKTRKNEMLVKGVKEGRWTEKFISRINFKGDLIVSSPDVSLVELGPDVEFVLLATDGLWDYIKSSEAVALVRDQLRQHGDVQVACEALGQIALDRRSQDNISIVIADLGRTNWKELPAQRPNLFLELTQAVATVGAVSLGIYISSLLALQ

SEQ ID NO: 263 - DNA, 729 bp, Oryza sativa
  ref <308>: DATABASE ACCESSION NUMBER: LOC_Os12g37970
atggtgacagtgagagaagagatacgcaaagggccatggacagagcaggaggacctgcaactggtatgcactgtccgattgttcggtgaacgtcgttgggatttcattgccaaagtatcaggccttaatcgcacaggcaagagctgccgcctccggtgggtcaactacctccaccctggcctcaagcgtgggcgcatgtctccgcatgaagagcgcctcatccttgagctccatgctcggtggggaaacaggtggtccaggatagcaaggcgtctgccaggacgtactgacaatgagatcaagaactactggaggacacatatgaggaagaaagcacaggagaggaagagtaacatgtcaccctcatcatcctcgtcttcactgacataccaatcttgccacccagagaccccgtcaatgatcattggaattgaggagcaggaacttcatggcggcagtggctgcatcacaagcatcatgaaaagcacccctgttgacatggatggttatcccatggatcagatatggatggaaattgaggcaccaaatgtgctcccagggccatgttttgatgaagcaaaggatagtgcatccaatagcctatctggtcctctattgccatatcctatgtgggattactattgcccagaaacatgcttgaggatggatgatgagatcaaggtagcaccacaatttggttatggtaaaggggtgggcccatgttattga

SEQ ID NO: 264 - protein, 242 aa, Oryza sativa
  ref <308>: DATABASE ACCESSION NUMBER: LOC_Os12g37970
MVTVREEIRKGPWTEQEDLQLVCTVRLFGERRWDFIAKVSGLNRTGKSCRLRWVNYLHPGLKRGRMSPHEERLILELHARWGNRWSRIARRLPGRTDNEIKNYWRTHMRKKAQERKSNMSPSSSSSSLTYQSCHPETPSMIIGIEEQELHGGSGCITSIMKSTPVDMDGYPMDQIWMEIEAPNVLPGPCFDEAKDSASNSLSGPLLPYPMWDYYCPETCLRMDDEIKVAPQFGYGKGVGPCY

SEQ ID NO: 265 - DNA, 714 bp, Oryza sativa
  ref <308>: DATABASE ACCESSION NUMBER: LOC_Os01g54890
atgtctctctccttggggtttagcgccggcgccggcgtcggtgccgatcgcctcgccgccgcgcccgcgctccaggccgccggtgctctgccgccacgcgtggacgtgtctctgtcgctggcgcgcgcggccaacgggcagccgtcgtcgtacctcccgctcaacgagaacgactcgctggacatggtcctcttcgacgtcctccgcgaggcctccgcggtggcggcgctgtcgtcgtcgtcgtcgtcgtcgccggagctgggcgcgcggacgacggcgccggtggtcgccggccaccccgccgggcgcaagggtggcggcggcggaggcggaggcaggggagcggcggcgaggggcggcgccgctggcgggcggcactaccgcggtgtgaggcggcggccgtgggggaagtacgccgcggagatccgtgacccgacgcggcacggcgcgcggctgtggctcggcaccttcggcacggccgaggaggccgccgcggcgtacgaccgcgccgcgttccgcatgcggggcgccaaggcgctgctcaacttcccgccggctgtcgccggtgacggcgcccgtcgcggcgccgccgcggccgcgaagcaggtcggcatgagcgacgtggtaccaagagcatgtcatgtagtttgttactctgtgcttagtgctcacattttttatgatatctttcgtggtgtgataccaattccgtga

SEQ ID NO: 266 - protein, 237 aa, Oryza sativa
  ref <308>: DATABASE ACCESSION NUMBER: LOC_Os01g54890
MSLSLGFSAGAGVGADRLAAAPALQAAGALPPRVDVSLSLARAANGQPSSYLPLNENDSLDMVLFDVLREASAVAALSSSSSSSPELGARTTAPVVAGHPAGRKGGGGGGGGRGAAARGGAAGGRHYRGVRRRPWGKYAAEIRDPTRHGARLWLGTFGTAEEAAAAYDRAAFRMRGAKALLNFPPAVAGDGARRGAAAAAKQVGMSDVVPRACHVVCYSVLSAHIFYDIFRGVIPIP

SEQ ID NO: 267 - DNA, 783 bp, Oryza sativa
  ref <308>: DATABASE ACCESSION NUMBER: LOC_Os12g29330
atggagacgacggcggcgaagaagctgccgccggggttcaggttcaggcccaccgacgaggagcttgtggtgcactacctccgccgccgcgcgctcggctcccctctcccgcccgccgtcgacatccccgatgtccgcctcctcgcgcatgacccctccgacctgcttcctccagggtggagtgagcaggagaggtacttcttcacgtgcaaggaggccaagtatgtcaaggggcgccgcgccaaccgcgccacgggcgccgggtactggaaggcgacggggaaggagaagccggtggcggtgtccgtggcggcggcgccgaggagccaggccgccgccgtcgtcgtcggcatgaagcgctccctcgtgttctaccgcgggaagccgccgaccggcaagaagacggactgggtcatgcacgagtaccgcctcgccggcgccggcctcgccccgtgccgccgcgccgccaccgccgaccacccggcgcgccccgccgagggctgggtgctctgccgcgtgttccggaagaaaggctccgcggccgcgtcgacagccagccccaccgccgacgccgacgacgacgacgccaccacggagcgcgccgacgacgccgcggcgggcgtccggttcatcgacttcttcgcccgcgccgacgcgcggcggcgccgcgcggcgtcgccggtgtcgtcgagctgcgtgacggatgcgtcggcggagcattgcagggagcaggagacgacgagccggaacggcggcgccgccgccggcgacgcctccgactaa

SEQ ID NO: 268 - protein, 260 aa, Oryza sativa
  ref <308>: DATABASE ACCESSION NUMBER: LOC_Os12g29330
METTAAKKLPPGFRFRPTDEELVVHYLRRRALGSPLPPAVDIPDVRLLAHDPSDLLPPGWSEQERYFFTCKEAKYVKGRRANRATGAGYWKATGKEKPVAVSVAAAPRSQAAAVVVGMKRSLVFYRGKPPTGKKTDWVMHEYRLAGAGLAPCRRAATADHPARPAEGWVLCRVFRKKGSAAASTASPTADADDDDATTERADDAAAGVRFIDFFARADARRRRAASPVSSSCVTDASAEHCREQETTSRNGGAAAGDASD

SEQ ID NO: 269 - DNA, 645 bp, Oryza sativa
  ref <308>: DATABASE ACCESSION NUMBER: LOC_Os06g03670
atggagtactacgagcaggaggagtacgcgacggtgacgtcggcgccgccgaagcggccggcggggaggaccaagttcagggagacgaggcacccggtgtaccgcggcgtgcggcggcgggggcccgcggggcggtgggtgtgcgaggtcagggagcccaacaagaagtcccgcatctggctcggcaccttcgccaccgccgaggccgccgcgcgcgcccacgacgtcgccgcgctcgccctccgcggccgcggcgcgtgcctcaacttcgccgactcggcccgcctcctccgcgtcgacccggccaccctcgccacccccgacgacatccgccgcgccgccatcgagctcgccgagtcatgcccgcacgacgccgccgccgccgccgcctccagctccgccgccgccgtcgaggcctccgccgccgccgcgcccgccatgatgatgcagtaccaggacgacatggcggcgacgccgtccagctacgactacgcgtactacggcaacatggacttcgaccagccgtcctactactacgacgggatgggcggcggcggcgagtaccagagctggcagatggacggcgacgacgatggtggcgccggcggctacggcggcggcgacgtcacactctggagctactga

SEQ ID NO: 270 - protein, 214 aa, Oryza sativa
  ref <308>: DATABASE ACCESSION NUMBER: LOC_Os06g03670
MEYYEQEEYATVTSAPPKRPAGRTKFRETRHPVYRGVRRRGPAGRWVCEVREPNKKSRIWLGTFATAEAAARAHDVAALALRGRGACLNFADSARLLRVDPATLATPDDIRRAAIELAESCPHDAAAAAASSSAAAVEASAAAAPAMMMQYQDDMAATPSSYDYAYYGNMDFDQPSYYYDGMGGGGEYQSWQMDGDDDGGAGGYGGGDVTLWSY

SEQ ID NO: 271 - DNA, 843 bp, Oryza sativa
  ref <308>: DATABASE ACCESSION NUMBER: LOC_Os08g31580
atggcagctgctatagaaggaaatctgatgcgggcgctgggagaggctccgtcgccgcagatgcagaagatcgcgccgccgccgtttcatcccggcttgccgccggcgccggcgaacttctcctcggccggagtccacgggttccactacatgggcccggcccagctcagcccggcccagatccagcgcgtccaggcccaactccacatgcagcggcaggcccagtcggggctcggcccgcgggcccagcccatgaagcccgcttcggcggctgctccggcggcggcggcggcgcgggcgcagaagctgtaccgcggcgtgcggcagcggcactggggcaagtgggtggcggagatccggctgccgcgcaaccgcaccaggctctggctcggcaccttcgacaccgccgaggaggcggcgctcacctacgaccaggccgcgtaccgcctccgcggcgacgcggcgcggctcaacttcccggacaacgccgcgtcgcggggcccgctcgacgccgccgtggacgccaagctccaggccatctgcgacaccatcgccgcgtccaagaacgcctcatccaggtccaggggcggcgccggcagggccatgcccatcaacgcgcccctggtcgccgcggcgtcgtcgtcctccggctccgaccactccggcggcggcgacgacggcggctcggagacgtcgtcgtcgtctgcggcggcgtcgccgctggcggagatggagcagctggacttcagcgaggtgccgtgggacgaggcggaggggttcgcgctcaccaagtacccgtcgtacgagatcgactgggactcgctgctcaacaacaataactag

SEQ ID NO: 272 - protein, 280 aa, Oryza sativa
  ref <308>: DATABASE ACCESSION NUMBER: LOC_Os08g31580
MAAAIEGNLMRALGEAPSPQMQKIAPPPFHPGLPPAPANFSSAGVHGFHYMGPAQLSPAQIQRVQAQLHMQRQAQSGLGPRAQPMKPASAAAPAAAAARAQKLYRGVRQRHWGKWVAEIRLPRNRTRLWLGTFDTAEEAALTYDQAAYRLRGDAARLNFPDNAASRGPLDAAVDAKLQAICDTIAASKNASSRSRGGAGRAMPINAPLVAAASSSSGSDHSGGGDDGGSETSSSSAAASPLAEMEQLDFSEVPWDEAEGFALTKYPSYEIDWDSLLNNNN

SEQ ID NO: 273 - DNA, 900 bp, Oryza sativa
  ref <308>: DATABASE ACCESSION NUMBER: LOC_Os03g53020
atgcaaatggagtcgtactacggcgcgttccacgccgacgaggccgcgttcttcttcccccaccacgtgccggcgtcgccggagctgccgttcggcctcattgcgtcgccggagccggagccggagccggagcaggcggcggcggaggcgaggcagagcgcgttccaggagtacggcggcgcggtgcacgccggagcgccggcggcggcgggggctgtcaccaccggtgggacgaacatccaccggagggtgatggacgtgctgggcaggatgggcggcggcggcggcgggggggagaagggggagggtgaggagatggaggaggaggaggaggtgccgcagcggcggcggcgcgggcagggcgccgacgtggagagcagccgcggtttccgccacatgatgcgcgagcgccagcgccgcgagaagctcagccagagctacgccgacctctacgccatggtctcctctcgctccaagggggacaagaactcgatcgtgcagtcggcggcgatctacatccacgagctgaaggtcgcgagggaccagctgcagaggaggaacgaggagctgaaggcccagatcatgggccacgacgagcagcagccgtgcgtcacggtgcagttcgaggtcgacgagccgtcgtcgtcgatcgactccatgatcgccgcgctccggcggctcaagggcatgagcgtcaaggcgcgcgggatccggtcgagcatgtccgggaacaggctgtggacggagatgaacgtcgagaccacgattgcggcttgtgaagtggaaaaggcagtggaagaggctctcaaggaagtagagaggaaccagcctgacagcgatgccccatttcctggaagcaaaggctggacacagacatctcatgtgcaaaatgtgttttga

SEQ ID NO: 274 - protein, 299 aa, Oryza sativa
  ref <308>: DATABASE ACCESSION NUMBER: LOC_Os03g53020
MQMESYYGAFHADEAAFFFPHHVPASPELPFGLIASPEPEPEPEQAAAEARQSAFQEYGGAVHAGAPAAAGAVTTGGTNIHRRVMDVLGRMGGGGGGGEKGEGEEMEEEEEVPQRRRRGQGADVESSRGFRHMMRERQRREKLSQSYADLYAMVSSRSKGDKNSIVQSAAIYIHELKVARDQLQRRNEELKAQIMGHDEQQPCVTVQFEVDEPSSSIDSMIAALRRLKGMSVKARGIRSSMSGNRLWTEMNVETTIAACEVEKAVEEALKEVERNQPDSDAPFPGSKGWTQTSHVQNVF

SEQ ID NO: 275 - DNA, 768 bp, Oryza sativa
  ref <308>: DATABASE ACCESSION NUMBER: LOC_Os02g49986
atgggcaggcagccgtgctgcgagaaggttggcctgaagaaggggccatggacggccgacgaggaccagaagctggtcaccttcctcctctccaatggccactgctgctggaggctcgtccccaagctcgcagggctgctcaggtgtgggaagagctgccggctgaggtggacgaactacctgcggcccgacctcaagaggggcctcctttccgaagaggaggagaagctggtcattgacctccacgagcagctcggcaacagatggtccaagattgcggcacggctccccgggaggacggacaacgagatcaagaaccactggaacacccacatcaagaagaagctcaagaagatgggccttgatcccgtcactcaccggccggtgatgtcactcgctcagcctgatcccctgaagcagcagcagcagcagcatgaaccgtccgtctccggcggcaccggtgccgacgacaaggaggaggaggaggaggagacgccgacgagcgcccagccacagggcgtcgcttgcgctgcttcatccgcctccgccgtgtcgtcgtcatgctcctcgtccgcctcggcctccgccgcgacacccggcgcggacgtggactggcccggcctcttcgaggtggatgccattcttgacattgactgggctggcttattgtctgcctgcggcgacgatggcggctgcagcgccattggcgtcgatatgttgttcgaccaatgctctgacgttggctttgatcaagatgtgtggatgtga

SEQ ID NO: 276 - protein, 255 aa, Oryza sativa
  ref <308>: DATABASE ACCESSION NUMBER: LOC_Os02g49986
MGRQPCCEKVGLKKGPWTADEDQKLVTFLLSNGHCCWRLVPKLAGLLRCGKSCRLRWTNYLRPDLKRGLLSEEEEKLVIDLHEQLGNRWSKIAARLPGRTDNEIKNHWNTHIKKKLKKMGLDPVTHRPVMSLAQPDPLKQQQQQHEPSVSGGTGADDKEEEEEETPTSAQPQGVACAASSASAVSSSCSSSASASAATPGADVDWPGLFEVDAILDIDWAGLLSACGDDGGCSAIGVDMLFDQCSDVGFDQDVWM

SEQ ID NO: 277 - DNA, 2196 bp, Oryza sativa
  ref <308>: DATABASE ACCESSION NUMBER: LOC_Os01g54990
atggcgtcgtccgcatcctcctcctcctccccatcctcgcggccgccgctgatggctctcccctctttttaccggcccccttggccgtccgagaggggcggcgagcagcgagccaccgactgttgggccggatccccagcggcgggaggcggccgggcgcgtgccaccgccatgggcatcgacctcaacaacaccgcgagcggcggcgaggaggacgcgccggcgccggggccggtgtgccgggatctgtggcacgcgtgcgctgggccggtggtgtcgctgccgcggcggggcagcgcggtcgtgtacctgccgcaggggcacctctccgcggccggcgccggcggcgggatccgcggggaggtggcggttgccctccctccccacgtggcgtgccgcgtcgtggacgtcgagctatgcgcggatgcagcgacggacgaggtgtacgcgcgactggcgctgcgggcggagggcgaggtatttgagaggaacttgcatggtggtggaatcgaaagggaggatgacatggaggatggtgatgaggaaaggaagtccaggatgctgcacatgttctgcaaaacactaacggcctctgatacaagcacacatggagggttctctgttcctcgtcgggctgctgaggattgctttccacctctggaccacaaacagctaaggccttctcaagagcttgttgccaaggatttgcatggagcaaagtggaggttccgccatatttatagaggtcaacctcgcaggcatcttttaacaactggatggagctcctttgtcaataaaaagaaactggtctcaggggacgcggtgttatttctccggggtgatgatggtgagctaagattgggtgttcgaagagctactcagcttaaaaatgaagcgattttcaaagcttttagtagcgaaagttcaaagatgcgcacactgtcggctgtggctgattccttgaaacatggaagtgtttttcacatttgttacaacccaagggctactgcttctgagtacgttgttccatattggaagttcgtgaaaagcttcaaccatccagtttgtattggaatgaggttcaagtttcattttgagagtgaagatgttaatgagaggcgttctggaatgattgccggtgttagtgaagtagaccccatcagatggcctggttcaaagtggagaagccttctggttcgatgggaggatgctactgactgcaacagccaaaatagagtatctccatgggagattgagatagttggtggttcaatctctgttgctcattctctgtcggcatccagttctaaaagaaccaaattatgccctcagggcaatttggacgtgccagctctgtatggaaatggtcgtccagactcggtggaaactgaaaagttccccagggtcttgcaaggtcaagaattgatgggttctaggacccatcgtgctacttgttctcctcagtcaatcgacattacaaaaagtaagtcttttgatgcttggagattccttactgatacacgaagctgcatgttgggcagttcaacaagcagacttccagtgcagtactctggctatacccaccaatctgtaagcttcggtgaatctattggattcccagaggtcttgcaaggtcaagaaatttctcagacagttcctccgtttcaaggaatgttgcctgatgcatgttcagcgaaaagcagatatgaattaaagaattatgtgtgcaccccagctaccatgaatggactatcatctgcaaatgaaggatattgtctctccctgtcaactgtgccaccttctccaccttccagtcttatgttataccaaacaggggtaccacagcttgaattggcaagcaagaacaatgacaaaagtggaaatgacagccaaccagccttgcgacagcacaagttgctcagtgaaactagctgggaccagtttaaaattggaaaggcttcaacacctgggaatgctactaagcctggtaatggtggaagggaggttgacagaactagttgccgcctttttggtttttccttgaccgagaagattatcccaacagacaaagatggtgaaaaggaagtgagttatgaaactgattgccaaaatccacggatgctagacttgtttgggtacaattgcagtacgcctggtgctcttcatgccctttgtgctgctcctttgggaatatga

SEQ ID NO: 278 - protein, 731 aa, Oryza sativa
  ref <308>: DATABASE ACCESSION NUMBER: LOC_Os01g54990
MASSASSSSSPSSRPPLMALPSFYRPPWPSERGGEQRATDCWAGSPAAGGGRARATAMGIDLNNTASGGEEDAPAPGPVCRDLWHACAGPVVSLPRRGSAVVYLPQGHLSAAGAGGGIRGEVAVALPPHVACRVVDVELCADAATDEVYARLALRAEGEVFERNLHGGGIEREDDMEDGDEERKSRMLHMFCKTLTASDTSTHGGFSVPRRAAEDCFPPLDHKQLRPSQELVAKDLHGAKWRFRHIYRGQPRRHLLTTGWSSFVNKKKLVSGDAVLFLRGDDGELRLGVRRATQLKNEAIFKAFSSESSKMRTLSAVADSLKHGSVFHICYNPRATASEYVVPYWKFVKSFNHPVCIGMRFKFHFESEDVNERRSGMIAGVSEVDPIRWPGSKWRSLLVRWEDATDCNSQNRVSPWEIEIVGGSISVAHSLSASSSKRTKLCPQGNLDVPALYGNGRPDSVETEKFPRVLQGQELMGSRTHRATCSPQSIDITKSKSFDAWRFLTDTRSCMLGSSTSRLPVQYSGYTHQSVSFGESIGFPEVLQGQEISQTVPPFQGMLPDACSAKSRYELKNYVCTPATMNGLSSANEGYCLSLSTVPPSPPSSLMLYQTGVPQLELASKNNDKSGNDSQPALRQHKLLSETSWDQFKIGKASTPGNATKPGNGGREVDRTSCRLFGFSLTEKIIPTDKDGEKEVSYETDCQNPRMLDLFGYNCSTPGALHALCAAPLGI

SEQ ID NO: 279 - DNA, 1749 bp, Oryza sativa
  ref <308>: DATABASE ACCESSION NUMBER: LOC_Os01g67770
atggacgccaccgccttcccctacgggctgcgcgtcctcgtcgtggacgacgaccccacctggctcaagatcctcgagaagatgctcaggaagtgttcctacgaagtcaccacatgtggcctggcaagagttgctctggatattctccgggagaggaaaaacaagttcgacattgtaattagcgatgtcaacatgcctgatatggatggtttcaagcttctggaacacattggacttgagatggatcttcctgttataatgatgtccattgatggtgagacaagtagggtgatgaaaggtgtccagcatggtgcttgtgattacctccttaaacctgttcgaatgaaggagctccgcaatatttggcagcacgtgtataggaagaaaatgcatgaggttaaagagatcgaaggtaatgatagctgcgacgatcttcaaatactaagaaacagttttgagggactggatgagaagagcctttttatgagatctgactctgataccatgaggaagagaaaagatgtggacaaagaccatgcagatcaggagtcaagcgatggcaacactgttaaaaaggctagagttgtttggtctgttgatcttcaccaaaagttcgtaaatgctgtcaaccaaattggatttgacaaagttggaccaaagaaaatactggacttgatgaatgttcctggcttaacaagagaaaacgttgctagccatctacagaaatatcgcctctacctgagtaggttgcaaaagcagaatgaggaaaggatattaggcgctgctaggcaagatttcagtcacaagggaacatcagaaaaccttaacctccgaagttccttccaagagcaaccaagcaacatagcaaatggatatccgcatgcttctcagaatatacaaactcaggccaacatgctagattctcagctagaggacaccaagagcacagtgcccttgcctgtgccagataaaaaaagaactctagcaagtgatgctgctgactcacagaatgtcaccagtgcttcaagtttaggtggggttctgtctttcaaaagcatgccggtgaatcaggacaggaagccatcagaaacaatgatcttggaatgccaggcctggaccggaggcattccatcgaagcagttcatgcagtatccaaagcataaccatgaacgctgtgacctattaggggattattcatgcctgccaaagccagacttagaacacccagttggccctagtaatctgtatgctccaccacctcttatctcaatgagttgcggtatggagggggatgccagagacttctcagacgtgaagccagctattatggactgcatcaagtccttatcaccggcgttgacatgtacagtggattcagtttctgttcaacttagcgacagtgtggtgacctcgattgacggtgacctgaagtcttccggtgtggacgggttgcccagcattaaagattgttgccttgatcagacgaacagccaaggaagtttgcgtccttcgcaagagccaagtatcataggcagcacagagttggcttctctgcctgaggacttacccagttatccacttcacggtgtctcccttgagaatataggactgagtagcattgacttactaaactacagtgacgcaatgatactatccggactacaaagtaactggtatgatgatctagagtttagcagcgaaatgatggactatccatcgatagatgaatgtctctttgcatcatcctga

SEQ ID NO: 280 - protein, 582 aa, Oryza sativa
  ref <308>: DATABASE ACCESSION NUMBER: LOC_Os01g67770
MDATAFPYGLRVLVVDDDPTWLKILEKMLRKCSYEVTTCGLARVALDILRERKNKFDIVISDVNMPDMDGFKLLEHIGLEMDLPVIMMSIDGETSRVMKGVQHGACDYLLKPVRMKELRNIWQHVYRKKMHEVKEIEGNDSCDDLQILRNSFEGLDEKSLFMRSDSDTMRKRKDVDKDHADQESSDGNTVKKARVVWSVDLHQKFVNAVNQIGFDKVGPKKILDLMNVPGLTRENVASHLQKYRLYLSRLQKQNEERILGAARQDFSHKGTSENLNLRSSFQEQPSNIANGYPHASQNIQTQANMLDSQLEDTKSTVPLPVPDKKRTLASDAADSQNVTSASSLGGVLSFKSMPVNQDRKPSETMILECQAWTGGIPSKQFMQYPKHNHERCDLLGDYSCLPKPDLEHPVGPSNLYAPPPLISMSCGMEGDARDFSDVKPAIMDCIKSLSPALTCTVDSVSVQLSDSVVTSIDGDLKSSGVDGLPSIKDCCLDQTNSQGSLRPSQEPSIIGSTELASLPEDLPSYPLHGVSLENIGLSSIDLLNYSDAMILSGLQSNWYDDLEFSSEMMDYPSIDECLFASS

SEQ ID NO: 281 - DNA, 933 bp, Oryza sativa
  ref <308>: DATABASE ACCESSION NUMBER: LOC_Os04g23550
atggacgccgagatggccatgggcgagagcttcgcctactactgggagacgcagcgctaccttgagtccgaggagctcgacagcatgtacctgccgacgcaggatgactccaactacgagtcgagctcgccggacgggtcgcactcgtcgtcggcgccggcgccggcggccgtgggcggggacgcagccgccgcggtggcgggtagcggtggcgggatgacgacgatgatgatgggcggcggcggcggcggtggcgacgacgccggtggcgcgaacaagaacatcctcatggagcgcgaccgccgccgcaagctcaacgagaagctctacgcgctccgcagtgtcgtgcccaacatcaccaagatggacaaggcgtcgatcatcaaggacgcgatcgagtacatccagcgcctgcaggcggaggagcagcagatgctccgggaggtcgccgcgctcgagtccgccgccgcggcgagcgccgccccggccgcggcgaacccgttcgccggcctcggcgccgacgaggaacacgagtacggccaccaccacccctcgtcgtcgtcggagcggacgaagaaggtgaagcgggcgctgtccgtgtcgtccatcagcgacgccctgctcgccgcggcggcgccggcgccgccggtggagatccaggagctgcgcgtgtcggaggtgggcgacagggtgctggtggtgagcgtgacgtgcagcaagcgccgcgacgccatggcccgggtgtgccgcgccctcgaggagctccgcctccgcgtcatcaccgccaacatcacctccgtcgccggctgcctcatgcacaccctcttcgtcgaggtagatcacatggatagtgtccaaatgaagcagatggtggaggctgctctctcccagcttgtggcgaccggcagtccgttgagctccatgagctattag

SEQ ID NO: 282 - protein, 310 aa, Oryza sativa
  ref <308>: DATABASE ACCESSION NUMBER: LOC_Os04g23550
MDAEMAMGESFAYYWETQRYLESEELDSMYLPTQDDSNYESSSPDGSHSSSAPAPAAVGGDAAAAVAGSGGGMTTMMMGGGGGGGDDAGGANKNILMERDRRRKLNEKLYALRSVVPNITKMDKASIIKDAIEYIQRLQAEEQQMLREVAALESAAAASAAPAAANPFAGLGADEEHEYGHHHPSSSSERTKKVKRALSVSSISDALLAAAAPAPPVEIQELRVSEVGDRVLVVSVTCSKRRDAMARVCRALEELRLRVITANITSVAGCLMHTLFVEVDHMDSVQMKQMVEAALSQLVATGSPLSSMSY

SEQ ID NO: 283 - DNA, 2850 bp, Oryza sativa
  ref <308>: DATABASE ACCESSION NUMBER: LOC_Os07g48200
atggcggggatggctgcggcggcggcggcgttggtggcggcgaagaggtgcatgaacgccgcgtgcggggccccggccccgtccccggcgggaggggagtggaggaagggctggccgctgcgatccggtggcttcgccgtgctctgcgacaagtgcgggttggcatatgagcagcttgtgttttgtgatatatttcaccaaaaagaatctggctggagggactgctcattttgtgggaagcgtctccattgtggatgtattgcttcgaagaactcctttgatctacttgatagcggtggagttcaatgtgtcacttgcattaaaaattcagcagttcaatctgttccaagtccagtcgtccccaagcttttttcatcccaaaataaccagagactttttggcaaaagcgatgatttattgtctggtagaccactggagacatcctcccttatggtcgatgccagaaacgatgatcttactattatcgctaagaacaaccttccattcatggtgaaaaacgtagaagctgggcaaagcagtaatattttgaggcaaaaagaactagagaatggtgcgaggcagattaaatgggaactacctacccttagtatcggggacatgggaaggatacctttcctaactagatctcaaagtgcattggagtctcgaagagatgaaaataaagacccaactacagaaagcacgacaagtgaatcactttctgaggcatgcctcaacatgagcttgggaattgctagtaatggaaacaagttggaggctacttcaactgtggaaagacctatgctatcaccaacaacaggatttcctgaaggaagagagcttaccactgcattatctccatttcagcatgcacaaagggctcgtcattttctgaccagaccgccaagggttggtgaaggtgctgtttttgatccaacgaaagatatgcttccgcatcttcgtgttgcaaggccacctgcagaaggtaggggccgcaatcaattacttcctcgatattggcctagaataacagaccaagagctacagcaaatttctggagattcaaattccaccattgtccccctgtttgagaaggttctaagcgccagtgatgcaggccgcatagggcgccttgttctaccaaaagcctgtgcggaggcatatttccctccaatttctcagccagaaggtcgtcctttgacaattcaagacgcaaaaggcaaagaatggcattttcagttcagattctggccaaataacaacagcagaatgtatgtcttggagggggttacaccatgcatacaatcattacaattacaggctggtgatacagtgacttttagtcggatagaacctggagggaaacttgttatgggcttccggaaggccacaaacactgtcagtttgccagactcacagatttcagctattgccaacggttccattcttggggatacattattttctagtacaaatgagaatttagcaatagtaagtggttattcaggatttcttcagtcaataaagggggctgcagatctccatacaagctctatatacgatcatcatgtgaactcagctgacggggatgttagttggcttaagacagataaattcggcagcaggccagatgaggggtctttgcagtttttaaagagaggccgcaatattggttccaaaagcaggaggctttcaatggatgctgaagaagcctgggaactaaagctttactgggatgaggttcaggagctgttgcgtcctgctccaactgcaaaacctactgtcgtgatgattgaggactacgaaattgaagagtatgatgaaccccctgtgtttgcaaagagatcaatttttaccatccgttctactggggaacaagatcaatggattcaatgtgatgattgctcaaaatggcgccggttaccacttaatgttattgttgcatccaagtggacatgtgctgacaacacaatcgactcaaaaagctgttcctgctctgcacctgaagaattaacccccaaagaattgcacattgttcttcagcaatacgaagatatgaggaggcgaaggaacagctttggttttaagcagaacatccccgaaatggatgcggtcagccttgatgcctttgccactgccgcagtctatggtgatgtcgggaaccaaggttccccttctgttgcgacaaccacaaagcacccccggcatcgccctggctgcacctgcatagtgtgtatccagccacctagcgggaagggcccgaagcacaacccagcttgcacctgcaatgtctgcatgaccgttaggcgtcgcttcaagacactgatgatgaggaagaagcaacggcagtcggagcgagaggaggccgaggcgagcaagaagatcgcttggatgaacagagatgagcctgagggaagcagcctgtcaagatccccacagacggttgacactacccgagacggagatgtgaccatgttcgacaaggttgacatcaacaagggccacatagacctgaacttccaccctactgccgtccgagacgaggagcggcatggcgggcagcctcgggtgagcatggtcagcctcctggaggtggccaaccggccactggagaactacatgaagcagaacggcctgacgagcttggctggggagcaagggagctccagcacatgtacaggtgcagccacggttccgcagccggctctggtggagagcgaagagcggacgtccaacaacgacggcgggcgtgtggcgacggcagagcagccggagagcatggccgtcgacgaggctggagataaccagccggacaaggctgccggtgactctgctgctgctttagcttga

SEQ ID NO: 284 - protein, 949 aa, Oryza sativa
  ref <308>: DATABASE ACCESSION NUMBER: LOC_Os07g48200
MAGMAAAAAALVAAKRCMNAACGAPAPSPAGGEWRKGWPLRSGGFAVLCDKCGLAYEQLVFCDIFHQKESGWRDCSFCGKRLHCGCIASKNSFDLLDSGGVQCVTCIKNSAVQSVPSPVVPKLFSSQNNQRLFGKSDDLLSGRPLETSSLMVDARNDDLTIIAKNNLPFMVKNVEAGQSSNILRQKELENGARQIKWELPTLSIGDMGRIPFLTRSQSALESRRDENKDPTTESTTSESLSEACLNMSLGIASNGNKLEATSTVERPMLSPTTGFPEGRELTTALSPFQHAQRARHFLTRPPRVGEGAVFDPTKDMLPHLRVARPPAEGRGRNQLLPRYWPRITDQELQQISGDSNSTIVPLFEKVLSASDAGRIGRLVLPKACAEAYFPPISQPEGRPLTIQDAKGKEWHFQFRFWPNNNSRMYVLEGVTPCIQSLQLQAGDTVTFSRIEPGGKLVMGFRKATNTVSLPDSQISAIANGSILGDTLFSSTNENLAIVSGYSGFLQSIKGAADLHTSSIYDHHVNSADGDVSWLKTDKFGSRPDEGSLQFLKRGRNIGSKSRRLSMDAEEAWELKLYWDEVQELLRPAPTAKPTVVMIEDYEIEEYDEPPVFAKRSIFTIRSTGEQDQWIQCDDCSKWRRLPLNVIVASKWTCADNTIDSKSCSCSAPEELTPKELHIVLQQYEDMRRRRNSFGFKQNIPEMDAVSLDAFATAAVYGDVGNQGSPSVATTTKHPRHRPGCTCIVCIQPPSGKGPKHNPACTCNVCMTVRRRFKTLMMRKKQRQSEREEAEASKKIAWMNRDEPEGSSLSRSPQTVDTTRDGDVTMFDKVDINKGHIDLNFHPTAVRDEERHGGQPRVSMVSLLEVANRPLENYMKQNGLTSLAGEQGSSSTCTGAATVPQPALVESEERTSNNDGGRVATAEQPESMAVDEAGDNQPDKAAGDSAAALA

SEQ ID NO: 285 - DNA, 621 bp, Oryza sativa
  ref <308>: DATABASE ACCESSION NUMBER: LOC_Os04g58190
atggctcctgcggttgcctcctccccgtcactcgtgctctccgccgccgccgccaccgcctccaacaagcgcccggccgattccgacgcctcgccgccgcaccagggagatcgcacggggcagcaggagaagaagcagcagcagctggagtgcccgcgctgccgatccaccaacaccaagttctgctactacaacaactacagcacgtcgcagccgcgccacttctgccgcgcctgccgccgctactggacgcacgggggcacgctccgcgacgtgccggtgggcggcgcctctcgccgcggcggcggcggcaagcgccgcagggtctccgccgacgccgacccttcctcggcgtcgccgccgccacccacgacttccaccacggacgcgtacgccgacctcccagccggcttcccgttcctcagtgacggcgccttcctgccgcagttcggcctcgccggcgttgcgccggccgcgttctcttgggcatcggctgtccctgacttgtacaactgcgggatcgcgccgtgggacgatggaacggcggtcaccggcgcggcgtgggacaacttcgccgacatcgccggccttgatctcagctggccgccgccgggtaactga

SEQ ID NO: 286 - protein, 206 aa, Oryza sativa
  ref <308>: DATABASE ACCESSION NUMBER: LOC_Os04g58190
MAPAVASSPSLVLSAAAATASNKRPADSDASPPHQGDRTGQQEKKQQQLECPRCRSTNTKFCYYNNYSTSQPRHFCRACRRYWTHGGTLRDVPVGGASRRGGGGKRRRVSADADPSSASPPPPTTSTTDAYADLPAGFPFLSDGAFLPQFGLAGVAPAAFSWASAVPDLYNCGIAPWDDGTAVTGAAWDNFADIAGLDLSWPPPGN

SEQ ID NO: 287 - DNA, 1461 bp, Oryza sativa
  ref <308>: DATABASE ACCESSION NUMBER: LOC_Os01g09550
atgtacacctctcccacactccttgctctctcgtttgctcttctactgctcatcctcctcctctactactcgtcctctttgctctattcacagctagcaacaagaaggaggcttacacatgcatgtgcacggtctctgccggacgcatatgaatcaggcatgaatagggggcacatcagcagctcggagctcatcgacgccaagctcgaggaacgccggatctccacggccaagcactgccccagctgcggcaacaagctcgactgcaaaccggattgggtggggctaccggcaggagtcaagttcgatccgacggaccaggagttgatcgagcacctcgaggccaaagtgagggaagaaggctcaagatctcatcctctcatcgatgagttcatacccacgatagaaggggaggacggcatatgctacacccaccctgagaaacttccaggtgtgacaagggacggcctgagcaagcacttcttccaccggccgtcgaaggcgtacacgacggggacgaggaagcggcggaagatccagacggagtgcgacgtgcagaagggggagacgaggtggcacaagaccggcaagacccggccggtgatggtgagcggccggcagaaggggtgcaagaagatactggtcctctacaccaacttcggcaagcaccgcaagccggagaagaccaactgggtgatgcaccagtaccacctcggcgacctcgaggaggagaaggaaggggagctcgtcgtctgcaagatcttctaccagacgcagcctcggcagtgcagctggtcctccgaccgcggcggcggcgccgccgccaccgcatccgccgtgacgacggcggcggtgcagcaggatcagcagcgcaggagggacagcggcagcggcagctgctcgtcgacgagggaccacgaggtgtcggcgacgtcctactcgacggccgggtacgccgtcgccgccgccgtcgagatgcagcatttgaagcatgccgccgaccatttcagcttcgcgcctttcaggaagagtttcgaggaggttggtataagtggtgatcaggtacactccaatcagcttgggaggtcggagcagcagcatgctggccaggaacaacagccgcaccggccgttgcttgcaaccacgacggcggtgcctgccacggccttcctgatcagccggccgacgaaccctgtatcaaatatagtgccaccagcaatgcagcatgcatctgtcgttcttgatcatgatcagttccacgtgccagcaatccttctccaccacgacaaatttcagcagcagcaacaaaagcttgacaggaggtctgccggcttggaggaactgataatgggctgcacgtcttcgagcacaaaaggagaagcttcaattcctcactcccaagagacagaatggccttaccagccatactggactcctgacaaccaggatcatcatggatag

SEQ ID NO: 288 - protein, 486 aa, Oryza sativa
  ref <308>: DATABASE ACCESSION NUMBER: LOC_Os01g09550
MYTSPTLLALSFALLLLILLLYYSSSLLYSQLATRRRLTHACARSLPDAYESGMNRGHISSSELIDAKLEERRISTAKHCPSCGNKLDCKPDWVGLPAGVKFDPTDQELIEHLEAKVREEGSRSHPLIDEFIPTIEGEDGICYTHPEKLPGVTRDGLSKHFFHRPSKAYTTGTRKRRKIQTECDVQKGETRWHKTGKTRPVMVSGRQKGCKKILVLYTNFGKHRKPEKTNWVMHQYHLGDLEEEKEGELVVCKIFYQTQPRQCSWSSDRGGGAAATASAVTTAAVQQDQQRRRDSGSGSCSSTRDHEVSATSYSTAGYAVAAAVEMQHLKHAADHFSFAPFRKSFEEVGISGDQVHSNQLGRSEQQHAGQEQQPHRPLLATTTAVPATAFLISRPTNPVSNIVPPAMQHASVVLDHDQFHVPAILLHHDKFQQQQQKLDRRSAGLEELIMGCTSSSTKGEASIPHSQETEWPYQPYWTPDNQDHHG

SEQ ID NO: 289 - DNA, 1323 bp, Oryza sativa
  ref <308>: DATABASE ACCESSION NUMBER: LOC_Os01g54550
atggaggggggcggcgggggcgggtcgctgccgccgttcctgagcaagacgtacgagatggtggacgacccgtcgacggacgcggtggtggggtggacgcccgccggcaccagcttcgtcgtcgccaaccagcccgagttctgccgggatctgctccccaagtacttcaagcacaacaacttctccagcttcgtgcgacagctcaacacctatggctttaggaaagtagatccagaacaatgggaatttgcaaatgaggatttcataaaaggacagcggcaccggttgaaaaatatacatagacgcaaacctatattcagccattcatcacacagtcagggtgctggaccattaacagataatgaaaggaaagactatgaggaagaaatcgagaggctcaaatccgataatgcagcactgtcctcagagcttcaaaataatacgttgaagaaacttaatatggagaaacgaatgcaggctttggaagagaagctatttgttgtggaagatcagcagaggagtctgatatcatacgtcagagagattgtaaaggcaccaggatttctttctagctttgtacagcaacaagatcatcacaggaagaagaggagactgccaataccaatctccttccatgaggatgcaaatactcaggagaaccagatcatgccttgtgacttgaccaactcaccagctcagacattttacagagaatcatttgacaagatggaatcatccttgaactcattagaaaatttccttcgagaagcaagtgaagaatttggtaatgatatttcatatgatgatggtgtcccaggcccttcttcaactgttgttctcacagagctccattcacctggtgaaagtgatccccgtgtttcatcacctccaacaaggatgcgtacttcgtcagctggtgcaggagattcgcactcctctcgtgatgtagcagagtctaccagctgtgcagaaagtcctcctattcctcaaatgcattctcgtgtagatacacgagcgaaggtttctgaaatagatgttaattcagaacctgctgttacagaaactggtccatcaagagatcaacctgctgaagagcctcctgctgtcacacctggtgcaaacgatggcttctggcagcagtttcttaccgagcagcctggatcatcagatgcacatcaggaggctcaatcagaacggcgagatggaggaaacaaggtggatgagatgaaatcaggagatcgacaacatctttggtggggcaaaaggaacgttgagcagataacagaaaaacttggacttctcacctcaacggagaaaacctga

SEQ ID NO: 290 - protein, 440 aa, Oryza sativa
  ref <308>: DATABASE ACCESSION NUMBER: LOC_Os01g54550
MEGGGGGGSLPPFLSKTYEMVDDPSTDAVVGWTPAGTSFVVANQPEFCRDLLPKYFKHNNFSSFVRQLNTYGFRKVDPEQWEFANEDFIKGQRHRLKNIHRRKPIFSHSSHSQGAGPLTDNERKDYEEEIERLKSDNAALSSELQNNTLKKLNMEKRMQALEEKLFVVEDQQRSLISYVREIVKAPGFLSSFVQQQDHHRKKRRLPIPISFHEDANTQENQIMPCDLTNSPAQTFYRESFDKMESSLNSLENFLREASEEFGNDISYDDGVPGPSSTVVLTELHSPGESDPRVSSPPTRMRTSSAGAGDSHSSRDVAESTSCAESPPIPQMHSRVDTRAKVSEIDVNSEPAVTETGPSRDQPAEEPPAVTPGANDGFWQQFLTEQPGSSDAHQEAQSERRDGGNKVDEMKSGDRQHLWWGKRNVEQITEKLGLLTSTEKT

SEQ ID NO: 291 - DNA, 1857 bp, Oryza sativa
  ref <308>: DATABASE ACCESSION NUMBER: LOC_Os09g25330
atgaagttcatgaagctgggctccaagcccgacgccttccagtccgacggcgccgacgtcagatatgtgatctcagacctcgcaacagatgtcattgtgcatgtcagcgaagtcaaattttacttacataagtttccccttctgtccaagagcagcaagcttcagaggttagttattaaggccaccgaggaggggactgatgaggtccacatagatggctttcctggaggagtgacagcgttcgaaatatgcgctaagttctgctatgggatggttgttaccctcagtcctcacaatgttgttgcagcaagatgtgcagcagagtaccttgaaatgactgaagatgtggacaagggaaacttgatattcaaaatcgatgtcttcataaattctagcatcctccgtagctggaaagactctatcattgttctccagagcacaaaagcactattaccttggtccgaagagctgaaggtcatcggcagatgtatagatgctattgcttcaaagacatctgtggatccagctaatgtaacctggtcatacagtcacagcaggaaaggaatgagctgtactgaaatagttgaatcaacaggaagaacatcaatagctcctaaagactggtgggttgaggacttatgcgagctcgatgttgacctctacaagagagtgatggttgctgtcaaatccaaggggagaatgtcacctgaattgataggggaagcccttaaagcatatgctgtcagatggctgccagattcttatgatgctttggtcgcggaggattacatgagaaggaaccaatgtttggtcgagactataatatggttattgccgtcagataagacatcaggttgttcttgcaggtttctcttgaaactgttgaaagttgctatattggttggagctgggcaacatgtgaaggaagaacttatgagaaggattagtttccagttgcacaaagcttcggttaaggatctcttactacctgctgcttcacccagtgatggcgcacacgatgttaagttagtccataatcttgtgcagagatttgttgcaagaacagcgatgtcccacaatggtggttttgttgagaaatctgatgacaaaatgattgagcttaactttgaacaagaatccactttggctttaggagagctggttgatggctatctatctgaagtagcttcagatccagacctttcattgtctacatttgttgaactagcaacagcggttccagaagcagctaggcctgttcatgacagcttgtactcagctgttgatgcatatctcaaggagcatccaaacataagtaaagccgacaagaagaagatctgcggtctgatagatgtcaagaagctttcaacagatgcaagcatgcacgccacgcaaaacgaccgcctaccgctccggttggtggtgcaggtcctcttcttccaacagctgagggcgggttccagcaatgcgcttgctctaacggatggtggaggacacacgtgcgcaaagcctattatgaaggatcagagtgacatttgcgaaagacggataccaaggcatccaaactcgctgaacaagcaagcgaccagcctaagcgcgagagaggtcgagcaccggaagagcgagcacaggggaggaggcaggaacagcttcaaggaccagcttggcggcttccttctgcagtcaaggtccaggaggatctttgacaagatatggagcagcaaggggcagggagagaatggcaaaggttcagagacgtcaggtagctcacagagcccgccattgtcggctaagcctgcagatgtgaagccctctcccctcccacctcttaggaacaggagatattctgtttcatag

SEQ ID NO: 292 - protein, 618 aa, Oryza sativa
  ref <308>: DATABASE ACCESSION NUMBER: LOC_Os09g25330
MKFMKLGSKPDAFQSDGADVRYVISDLATDVIVHVSEVKFYLHKFPLLSKSSKLQRLVIKATEEGTDEVHIDGFPGGVTAFEICAKFCYGMVVTLSPHNVVAARCAAEYLEMTEDVDKGNLIFKIDVFINSSILRSWKDSIIVLQSTKALLPWSEELKVIGRCIDAIASKTSVDPANVTWSYSHSRKGMSCTEIVESTGRTSIAPKDWWVEDLCELDVDLYKRVMVAVKSKGRMSPELIGEALKAYAVRWLPDSYDALVAEDYMRRNQCLVETIIWLLPSDKTSGCSCRFLLKLLKVAILVGAGQHVKEELMRRISFQLHKASVKDLLLPAASPSDGAHDVKLVHNLVQRFVARTAMSHNGGFVEKSDDKMIELNFEQESTLALGELVDGYLSEVASDPDLSLSTFVELATAVPEAARPVHDSLYSAVDAYLKEHPNISKADKKKICGLIDVKKLSTDASMHATQNDRLPLRLVVQVLFFQQLRAGSSNALALTDGGGHTCAKPIMKDQSDICERRIPRHPNSLNKQATSLSAREVEHRKSEHRGGGRNSFKDQLGGFLLQSRSRRIFDKIWSSKGQGENGKGSETSGSSQSPPLSAKPADVKPSPLPPLRNRRYSVS

SEQ ID NO: 293 - DNA, 1056 bp, Oryza sativa
  ref <308>: DATABASE ACCESSION NUMBER: LOC_Os01g64790
atgacggtggcgggggcgtcggagctcatgtcggggtattaccaggcgcaggagatgtcgacgatggtgtcggcgctggcgcgcgtcgtggcgggcggcggcggcggcggcggcgacggcgacggcgaccagtgggcgtggtcgtcgccgtcgccgtcgtcgtcagcggcggcggcggcggcgcgtggcgtgcaggagaggaggcgggaggagcaggcaatgcacgagctggcgggatacgcctgcgggggcgcgccatcgccggagttcgcaggatcggagcagagctcggacacccagagcgcgagcgcggcgaccatggacgagcaccactcgccggtgggcggcggcgggaacgcggaggggcccgacacgccgcggcggcggtaccgcggggtgcggcagcggccgtgggggaagtgggcggcggagatccgggacccgcacaaggcggcgcgggtgtggctcggcacgttcgagacggcggaggccgcggcgcgggcctacgacgaggccgcgctccggttccgcggcagccgcgccaagctcaacttccccgaggacgcgcgcctctacccgaccgccgccaccaccaccaccgcggcgccgcccccggcgccggtcgcggcggcatcgccttccgcggccatctaccccggcgcctcccagagcgccgagtacctgcgctaccagatgcttctgcaggggaggcttaccaccgccacccccaaccaaggcacccttcttccgttctacggcggcggcggcggcggtggctccatgaccaatccctacggaggcggtggcggcggcgccatgagcggcttcctcggctcctactactctttccctaccccctctgtttccgtggccaccgtcccctcctccacctcctccgcgccgggcaactactactcgtcccacggcggctcgcaccagagcatgtcggcggcggaggagtggaactgggagaacgccctggtctacccggcgacggcggcgtcatggtcggagtcgagctatcaccaccacccgccgccgccgcacacgcagtag

SEQ ID NO: 294 - protein, 351 aa, Oryza sativa
  ref <308>: DATABASE ACCESSION NUMBER: LOC_Os01g64790
MTVAGASELMSGYYQAQEMSTMVSALARVVAGGGGGGGDGDGDQWAWSSPSPSSSAAAAAARGVQERRREEQAMHELAGYACGGAPSPEFAGSEQSSDTQSASAATMDEHHSPVGGGGNAEGPDTPRRRYRGVRQRPWGKWAAEIRDPHKAARVWLGTFETAEAAARAYDEAALRFRGSRAKLNFPEDARLYPTAATTTTAAPPPAPVAAASPSAAIYPGASQSAEYLRYQMLLQGRLTTATPNQGTLLPFYGGGGGGGSMTNPYGGGGGGAMSGFLGSYYSFPTPSVSVATVPSSTSSAPGNYYSSHGGSHQSMSAAEEWNWENALVYPATAASWSESSYHHHPPPPHTQ

SEQ ID NO: 295 - DNA, 2529 bp, Oryza sativa
  ref <308>: DATABASE ACCESSION NUMBER: LOC_Os05g33810
atggacgcccccggcggcggcggcggcggcggcggcggcggaggtggggtggatgccggcgagcccgtctgggactgggggaacctcctcgacttcgccgtccatgacgacgactcgctggtcctcccgtggggggacgattcgattgggatcgaggccgatcccgccgaggcggcgctgctcccccctgccccgtcgccgcagccggcggaggcggaggcggaggccgcggggccggcgtcgctgccgtcgtctatgcaggcggagggaagcaagcggcgcgtgaggaagcgcgacccgcggctggtttgcccgaactacctcgccgggagggtgccgtgcgcgtgccccgagattgacgagatggcggccgccttggaggtcgaggacgtggccacagagttgctggcaggggcgcggaagaagccgaagggtgccggccgtggtagtggtgcggcagtcggcggaagtggtggaggggctagccgtgggacaccggccgagatgaagtgccaggtgcctggttgtgaggcggacatacgtgagctgaagggataccaccgccggcacagggtgtgtttgcgctgcgcgcacgccgccgctgtcatgcttgatggtgtccagaagcgctattgccagcagtgtggcaagtttcatatattactagatttcgatgaagataaaaggagttgtagaaggaaattggagcggcacaacaaaagaagacgaagaaaacctgattccaaaggcatattggagaaagatatagatgaccagttggatttttcagcagatggtagtggtgatggtgaactaagagaagagaacatagatgtcactaccagtgagacgcttgagactgttctgagcaataaggttttggacagggaaacacctgtgggttccgatgatgtgcttagttctccaacatgtgcacaacccagtttgcaaatcgaccaaagtaaaagcttagtgactttcgctgcttctgttgaagcctgccttggcactaaacaggaaaacaccaaacttaccaattctcctgtgcatgacacaaagagtacttactcatcctcgtgtcccacaggacgtgtatcattcaagttgtacgattggaatcctgctgaatttcctcgacgcttacgccaccaaatatttgagtggctttctagcatgcctgttgaactggagggctatattcgtcctggttgtacaattttaactgtatttgttgcaatgccacaacatatgtgggacaagttatccgaagacacaggaaatcttgtcaaaagcttggtaaatgctccaaatagtctcctgttgggtaaaggggccttctttatccatgtcaataatatgatatttcaagtattgaaagatggtgcaacattgaccagtaccagattagaggtacagtccccgaggattcactatgttcatccatcatggtttgaagcaggaaagcccatcgatcttattctttgtggaagttctcttgatcagcctaaattcaggtcacttgtgtcatttgatggactgtacttgaagcatgattgtcgccgtatactgtcacatgagacctttgattgtattggaagtggggaacatatacttgattctcaacatgaaatattccggataaatattaccacatcaaagctggatactcatggacccgcatttgtggaagtggaaaacatgtttgggctatcaaattttgttcctatccttgttggtagcaagcatttatgttctgaactagagcagatacatgatgctctgtgtggttcttcggacataagttctgatccttgtgagcttcgaggacttcgacagactgcaatgttgggattcctcatcgacattggatggctaataaggaagccatccatagatgaatttcaaaacctactgagtttagcaaatatccagagatggatatgcatgatgaaattcctgatacagaacgattttatcaatgttctggaaataatagtgaactcgttggacaacatcatagggtcagagcttctttctaacttggaaaagggtagactggaaaatcatgtaacagaatttcttgggtatgtaagcgaagctcgaaacattgttgataatagacctaaatatgacaagcagagacaggttgatacaagatgggcaggtgattatgctccaaaccagccaaagttgggcatttctgtgccacttgctgaaagtactggaaccagtggagaacatgatttgcactcaaccaatgcagcttctggagaggaggaaaatatgcctctagtgactaaagctctcccacacaggcaatgctgtcaccctgagactagtgctagatggcttaacgctgcctccattggtgcttttccaggtggtgccatgagaatgcgtcttgccaccactgtggtaattggtgctgtggtatgttttgcagcttgtgttgtccttttccacccacacagagtaggggtgcttgccgcgccagtaaagaggtacttgtctaggaactactcatcatag

SEQ ID NO: 296 - protein, 842 aa, Oryza sativa
  ref <308>: DATABASE ACCESSION NUMBER: LOC_Os05g33810
MDAPGGGGGGGGGGGGVDAGEPVWDWGNLLDFAVHDDDSLVLPWGDDSIGIEADPAEAALLPPAPSPQPAEAEAEAAGPASLPSSMQAEGSKRRVRKRDPRLVCPNYLAGRVPCACPEIDEMAAALEVEDVATELLAGARKKPKGAGRGSGAAVGGSGGGASRGTPAEMKCQVPGCEADIRELKGYHRRHRVCLRCAHAAAVMLDGVQKRYCQQCGKFHILLDFDEDKRSCRRKLERHNKRRRRKPDSKGILEKDIDDQLDFSADGSGDGELREENIDVTTSETLETVLSNKVLDRETPVGSDDVLSSPTCAQPSLQIDQSKSLVTFAASVEACLGTKQENTKLTNSPVHDTKSTYSSSCPTGRVSFKLYDWNPAEFPRRLRHQIFEWLSSMPVELEGYIRPGCTILTVFVAMPQHMWDKLSEDTGNLVKSLVNAPNSLLLGKGAFFIHVNNMIFQVLKDGATLTSTRLEVQSPRIHYVHPSWFEAGKPIDLILCGSSLDQPKFRSLVSFDGLYLKHDCRRILSHETFDCIGSGEHILDSQHEIFRINITTSKLDTHGPAFVEVENMFGLSNFVPILVGSKHLCSELEQIHDALCGSSDISSDPCELRGLRQTAMLGFLIDIGWLIRKPSIDEFQNLLSLANIQRWICMMKFLIQNDFINVLEIIVNSLDNIIGSELLSNLEKGRLENHVTEFLGYVSEARNIVDNRPKYDKQRQVDTRWAGDYAPNQPKLGISVPLAESTGTSGEHDLHSTNAASGEEENMPLVTKALPHRQCCHPETSARWLNAASIGAFPGGAMRMRLATTVVIGAVVCFAACVVLFHPHRVGVLAAPVKRYLSRNYSS

SEQ ID NO: 297 - DNA, 1164 bp, Oryza sativa
  ref <308>: DATABASE ACCESSION NUMBER: LOC_Os05g46040
atggcggcggcggcggcggcggcggcgatatgtggggaggatgagacggcggcgcgggtggggtgcacgggggaatgggcgggcgggatcgagagggtggatcttggggagaggaaggaggcggtggcggcggcgggggcggggaagaggagcgtctacctgatggactgcgcgccggtgtggggctgcgcgtcgacgcgcggccgcagcgcggagatggaggacgcgagcgccgccgtgccgcggttcgcggacgtgccggtgcggctgctcgccagccggcgcgacctcgacgcgctgggcctcgacgccgacgcgctccgcctgccggcgcacctcttcggcgtgttcgacggccacggcggcgccgaggtggcgaactactgccgtgaaaggatccacgtcgtcttgagcgaggagctgaagcgacttggcaagaatttgggggagatgggcgaggtggacatgaaagagcactgggatgatgtgttcacgaaatgtttccagagagtggacgatgaggtttcagggagagtgaccagggttgtcaatggtggcggtgaggtccggtcagaaccggtgaccgcagagaacgtcggctcgacggcggtcgttgcgcttgtctgctcatctcatgtggtggttgccaactgtggagattcgcgcatcgtgctctgccgcgggaaggagcccgtagccttgtcaattgatcacaagcctgacaggaaggatgagcgggcaaggattgaagcccagggaggcaaggtcatccaatggaatggttaccgggtgtccggtatacttgctatgtcccgatcaatcggtgatcgctatctgaaaccatttgtcattccaaaaccggaagttatggtcgttccacgggcgaaggatgatgactgtcttattctagcaagcgatgggctgtgggatgttgtgtcaaatgaagaggcatgcaaagtcgcacgccgacagatccttctgtggcacaagaacaatggcgctgcatcaccattgtctgatgagggtgaaggatccaccgaccctgctgcccaagcagctgccgattatctgatgagactcgctctgaagaaaggcagcgaggataacatcactgtcattgttgtcgacttgaaaccgcgaaagaaactcaagaacatttcataa

SEQ ID NO: 298 - protein, 387 aa, Oryza sativa
  ref <308>: DATABASE ACCESSION NUMBER: LOC_Os05g46040
MAAAAAAAAICGEDETAARVGCTGEWAGGIERVDLGERKEAVAAAGAGKRSVYLMDCAPVWGCASTRGRSAEMEDASAAVPRFADVPVRLLASRRDLDALGLDADALRLPAHLFGVFDGHGGAEVANYCRERIHVVLSEELKRLGKNLGEMGEVDMKEHWDDVFTKCFQRVDDEVSGRVTRVVNGGGEVRSEPVTAENVGSTAVVALVCSSHVVVANCGDSRIVLCRGKEPVALSIDHKPDRKDERARIEAQGGKVIQWNGYRVSGILAMSRSIGDRYLKPFVIPKPEVMVVPRAKDDDCLILASDGLWDVVSNEEACKVARRQILLWHKNNGAASPLSDEGEGSTDPAAQAAADYLMRLALKKGSEDNITVIVVDLKPRKKLKNIS

SEQ ID NO: 299 - DNA, 1725 bp, Oryza sativa
  ref <308>: DATABASE ACCESSION NUMBER: LOC_Os05g45930
atggggaagtctccggcgaagtggatcaaatccgtgctcttcgggaagaagtcatcgaggtccggctctaccaaggcgaaagatttatcgaagggctcgaacaacaaagggtatgctgctgctgggaaggatgctgggtttgagagctccccggtgatatcggagccggtgctcgttacacctcataacaatgaggctgtccaggaggttgggaggggtgagaattccagcttacaaggtgaagtggtggtgcgcgatgtcagtcaagacctggagaagcagaatactgtcgtttccgatgcgtccaacgaccccgagaggttgagagaggaacaagcggccgtcaaggcacaagctgccttccgaggctatctggcacgtcgggcattccgtgcgttgaaaggaatcataagactccaagccctgattcgtgggcatctcgtaaggaggcaagccgttgcaactcttcgtgcaacatggttgattgtgaagtttcaagctctagtccgtggtaggaatgtcagactttctactaataccattcaagtcaactggaagcttgttcaacaacagtcggggagtggtaagcgggatgcatggaaggagaaattgtcttcaaatgcatttgctcgtaagcttttagcttcaccaattctggtagaggctctccattttcaatatgatgagagggatccaaattcagccttcaactggttggagagatggaccataggtcgtgtctggaggcccatttcacatccaaagagagctgctgttactgatgccaagccacacacaaggaaggccagttatgcaatggaaacagagtcagggaagttgaagcgcaattctcggagaagttctgctgcaccagttgagtcctctcagacgaacatagccatggaaactgaaaaatcaaggcgaaacccaaggaaattcactagctctactgctgattcagtgcccgaaagtcagttaactgaacttgagaaggtcaaacgtaaccttaggaaggtaactaattctatggctgaggcttcaaaggtatctactcctgcaactgagatccctgaacgccaagaggtccaatgtgagaaaccacagcgaactgcagaagaagttccaaattatcctgagatccaagaacctcagaatggtaatctgttggaaaatgctaagacggatatcctggtacctgatcttcaacctgaaccggaggttccttcttatcaagttgaaactgaagaaaaagttgctgaactgactgttgctgaccctacggtagaaactatgccgctgcaagatatccacaatgaagaaaatgctttagtaaatgatatggaacagagatccaaagaagaacctctttctactgagagccttaaaagcagcaagaggaggtcttcattctcaaccaagacagagtatccagaaaatggttcaaagaattcgcctgctgttcccagctacatggctgcaacacaatctgcgaaggcgaaactgcggggacagaattcacccagacttagttctgactctgcggagaaaaatggcttcaccaggcgccattccctcccatcctctaatggtaagttgaactcgcactcgccgcgtacacaaaggccaacccatgctggtggcaaagagggagtgaaggctgacaagtctatgctatcatcaagagacgcaagtgaaagacctgccaaagctgaatggaaacgctga

SEQ ID NO: 300 - protein, 574 aa, Oryza sativa
  ref <308>: DATABASE ACCESSION NUMBER: LOC_Os05g45930
MGKSPAKWIKSVLFGKKSSRSGSTKAKDLSKGSNNKGYAAAGKDAGFESSPVISEPVLVTPHNNEAVQEVGRGENSSLQGEVVVRDVSQDLEKQNTVVSDASNDPERLREEQAAVKAQAAFRGYLARRAFRALKGIIRLQALIRGHLVRRQAVATLRATWLIVKFQALVRGRNVRLSTNTIQVNWKLVQQQSGSGKRDAWKEKLSSNAFARKLLASPILVEALHFQYDERDPNSAFNWLERWTIGRVWRPISHPKRAAVTDAKPHTRKASYAMETESGKLKRNSRRSSAAPVESSQTNIAMETEKSRRNPRKFTSSTADSVPESQLTELEKVKRNLRKVTNSMAEASKVSTPATEIPERQEVQCEKPQRTAEEVPNYPEIQEPQNGNLLENAKTDILVPDLQPEPEVPSYQVETEEKVAELTVADPTVETMPLQDIHNEENALVNDMEQRSKEEPLSTESLKSSKRRSSFSTKTEYPENGSKNSPAVPSYMAATQSAKAKLRGQNSPRLSSDSAEKNGFTRRHSLPSSNGKLNSHSPRTQRPTHAGGKEGVKADKSMLSSRDASERPAKAEWKR

SEQ ID NO: 301 - DNA, 1143 bp, Oryza sativa
  ref <308>: DATABASE ACCESSION NUMBER: LOC_Os03g55320
atgttgagggcggtggcgaggtgctgcgggcactggccgccgggggcggcggcggcggacgggatgctgtggcagacggagctgaggccgcacgcggcgggggagttctcgatggcggcggcgcaggcgaacctggccatggaggaccaggcgcaggtgctcgcctcccccgccgccacgctcgtcggcgtgtatgacgggcacggcggcgccgacgcctcccgcttcctccgctcccgcctcttcccccatgtccaacgattcgagaaggagcaaggggggatgagcacggaggtgatccgtagggcgttcggcgcggcggaggaggagttcctgcagcaggtgaggcaggcatggcggcagcggccgaagatggcggccgtgggctcctgctgcctgctcggggctatctccggagacacgctctacgtggccaacctcggcgactcccgcgccgtgctcggccgccgcgtggtcgggggcggggtggccgtcgccgagcggctcaccgacgagcataacgcggcctccgaggaggtccggcgggagctcaccgcgctcaacccggacgatgcgcagatcgtggtgcacgccaggggtgcgtggagggtgaaggggatcattcaggtatcgagaaccattggtgatgtttacttgaagaaacaagagtatagcatggatcccgtgtttcgtaacgttggtccccctattcctttgaagcggccagctcttagcgcagaaccatcgattcaagttcgcaagctcaaaccaaatgatctgttcctgatatttgcttcagatggtctctgggagcatctcagtgacgacgctgcggtgcagattgtcttcaagaatccaaggacgggtatagcaaacagattggtgaaggccgctttaaaggaagccacgaggaagagggaggtcagcttccgtgatctgaagacgatagagaagggagtgaggcgccatttccacgacgacatcagcgtcatcgtcgtctaccttgaccgccaccgcggtcgccgtcacacaagggtcgtcgactcgagcagcaactgcaccaacgcccccgtcgacatctactcctccaactccggccaatccgtggagactcttcaagcccatcggggctccggttggtag

SEQ ID NO: 302 - protein, 380 aa, Oryza sativa
  ref <308>: DATABASE ACCESSION NUMBER: LOC_Os03g55320
MLRAVARCCGHWPPGAAAADGMLWQTELRPHAAGEFSMAAAQANLAMEDQAQVLASPAATLVGVYDGHGGADASRFLRSRLFPHVQRFEKEQGGMSTEVIRRAFGAAEEEFLQQVRQAWRQRPKMAAVGSCCLLGAISGDTLYVANLGDSRAVLGRRVVGGGVAVAERLTDEHNAASEEVRRELTALNPDDAQIVVHARGAWRVKGIIQVSRTIGDVYLKKQEYSMDPVFRNVGPPIPLKRPALSAEPSIQVRKLKPNDLFLIFASDGLWEHLSDDAAVQIVFKNPRTGIANRLVKAALKEATRKREVSFRDLKTIEKGVRRHFHDDISVIVVYLDRHRGRRHTRVVDSSSNCTNAPVDIYSSNSGQSVETLQAHRGSGW

SEQ ID NO: 303 - DNA, 1455 bp, Oryza sativa
  ref <308>: DATABASE ACCESSION NUMBER: LOC_Os01g68700
atgaactgcgggccgcccgaccagttgccgccggcgacggcgccgtcgtgcttcctcaacctcaactgggaccagtccatggacgcggcggcgggagggcacctcgacccggcgctcagctccatggtgtcctcgccggcgtccaactcgacgggcgctctccacgggatctcgccgcagccgcactacggtggcgggacgccgctcagctcgccccccaagctcaacctgtccatgatggggcagttccaccactacgccgcgccgccgcaggtgggcggcggcggaggcggaggcgggggcctgccaatcctcgagaacctgatgcccatgggccacctcgaccagttcctcgccgaccctggcttcgccgagcgcgccgcgaggctctccggcttcgacgcccgcggcggcggcggaggaggaggctacggcggcgccggcccggcgcaattcggcctccctgacgccggcgcggccggcgcatcgaaggagatggagctcgggaacacccgggacgagtcgtcggtgtctgatccggcgcccggcggcgccgagattccgcccaagggggcttccgacggcaatgcacggaagcggaaggcctccgggaagggcaaaggcaaggacagccccatgtccacctccgccgccaaggaggattccagcggcaagcgttgcaaatcgacggaggagagcaatgcggccgccgaggagaattccggcaaggggaaggccgcgcagagcaacagcgagaatggcggcggcaagaagcaagggaaggacagctcgtcgaagccccccgagccgcccaaggactacatccatgtccgcgcccggcgcggcgaggcgacggacagccacagcctcgccgagagggtgagaagagagaagataagccagaggatgaagctgctgcaggatctcgtgccgggttgtaacaaggtggttggaaaggctgtcatgctcgatgaaatcataaactatgtgcagtcgttgcaacggcaagtcgagtttttgtccatgaagttggccactgtgaatccccagctggacttcaacaatttgcctaacctccttgctaaagatatgcaccagtcatgcagcccgttacagagctcacattttccactagagacctcaggtgcgccgctgccctacattaaccagcctcagcaagggaaccctctcggttgtggcctgacgaacggcatggacaaccagggttctatgcacccattggacccggcattttgccggccaatgggctcgcaccatcctttcctcaatggggttagcgatgcggcttctcaggttggtgctttctggcaagatgatctccaaagtgttgttcagatggatatggggcaaagtcaggagatcgccacctcttccaatagctacaatggtaggatcgttgcaaacagtccacatgaaaatggagctttgacatga

SEQ ID NO: 304 - protein, 484 aa, Oryza sativa
  ref <308>: DATABASE ACCESSION NUMBER: LOC_Os01g68700
MNCGPPDQLPPATAPSCFLNLNWDQSMDAAAGGHLDPALSSMVSSPASNSTGALHGISPQPHYGGGTPLSSPPKLNLSMMGQFHHYAAPPQVGGGGGGGGGLPILENLMPMGHLDQFLADPGFAERAARLSGFDARGGGGGGGYGGAGPAQFGLPDAGAAGASKEMELGNTRDESSVSDPAPGGAEIPPKGASDGNARKRKASGKGKGKDSPMSTSAAKEDSSGKRCKSTEESNAAAEENSGKGKAAQSNSENGGGKKQGKDSSSKPPEPPKDYIHVRARRGEATDSHSLAERVRREKISQRMKLLQDLVPGCNKVVGKAVMLDEIINYVQSLQRQVEFLSMKLATVNPQLDFNNLPNLLAKDMHQSCSPLQSSHFPLETSGAPLPYINQPQQGNPLGCGLTNGMDNQGSMHPLDPAFCRPMGSHHPFLNGVSDAASQVGAFWQDDLQSVVQMDMGQSQEIATSSNSYNGRIVANSPHENGALT

SEQ ID NO: 305 - DNA, 1422 bp, Oryza sativa
  ref <308>: DATABASE ACCESSION NUMBER: LOC_Os01g50940
atgtcgtggtccgagacggacgccgcgctgttcgcggcggtgctggggcacgacgcggcgcatcacctggccaccacgccgccgcacctcgacgcgccggaggggtcgccgtcgtcggccgagctgcaggcgagcctgcacgacctcgtcgagcggcagggaggggcctggacgtacggcatcttctggcaggagtcccgcggcgccggtgccgccagcggccgcgctgcccgcgccgtgctcggctggggcgacggccactgccgcgacggtgccggacacggggaggtcggcgccgcggagaggagcgtggcgcggaagcgcgtgctgctgcggctgcacgcgctgtacggaggcggggatgaggatggcgccgactacgcgctccggctggaccgggtcaccggcgccgagatgtacttcctggcgtccatgtacttctccttcccggagggctcgggcggaccgggccgcgctctggcctccggccgccacgcctgggcggacgtagacccccacccttccggctccggtagcgcgccagggtggtacgttcgctcgtctctcgcccagtccgcggggttacgcaccgtcgtcttcctcccgtgcaagggcggcgttctcgagctcggttccgtcgtagccatccgcgagacccccgaggtcttgcgcgccatccaatctgccatgcgcgccgtgccagctccgccggaagatttcatgagaatcttcggcaaggatctctcacccggccgaccgtcccagcccatgggatgcgacgccccatggacgccgcggctcgttgtccaaaccacgccggtgcgcccagccaagaaggaggtggtcaaggcgaaaccagccgagccccccaagagcttggacttctccaaggcgaacgtgcaggaacaggccggcggccaggagcggcggccgcggaagcgtgggcgcaagccggcgaacgggcgggaggagccgctgaaccacgtggaggcggagcggcagcggcgggagaagctgaaccagaggttctacgcgctgcgcgcggtggtgcccaagatctccaagatggacaaggcgtccctgctcagcgacgccatcgcgtacatccaggagctggaggcccggctcaggggcgacgcgcccgtgcccgcgcgggcggatgggccggccgtggaggtgaaggcaatgcaggacgaggtggtgctgcgcgtgaccacgcccctggacgagcaccccatctccagggtgttccacgccatgagggaatcccagatcagcgtcgtggcgtcggacgtggcggtgtcggacgacgccgtcacgcacacgctcatggtgcggtcggccgggccggagcggctcacggcggagacggtgctcgcggcgatgtcgcggggggtgagcgtcaccactccctccccgtga

SEQ ID NO: 306 - protein, 473 aa, Oryza sativa
  ref <308>: DATABASE ACCESSION NUMBER: LOC_Os01g50940
MSWSETDAALFAAVLGHDAAHHLATTPPHLDAPEGSPSSAELQASLHDLVERQGGAWTYGIFWQESRGAGAASGRAARAVLGWGDGHCRDGAGHGEVGAAERSVARKRVLLRLHALYGGGDEDGADYALRLDRVTGAEMYFLASMYFSFPEGSGGPGRALASGRHAWADVDPHPSGSGSAPGWYVRSSLAQSAGLRTVVFLPCKGGVLELGSVVAIRETPEVLRAIQSAMRAVPAPPEDFMRIFGKDLSPGRPSQPMGCDAPWTPRLVVQTTPVRPAKKEVVKAKPAEPPKSLDFSKANVQEQAGGQERRPRKRGRKPANGREEPLNHVEAERQRREKLNQRFYALRAVVPKISKMDKASLLSDAIAYIQELEARLRGDAPVPARADGPAVEVKAMQDEVVLRVTTPLDEHPISRVFHAMRESQISVVASDVAVSDDAVTHTLMVRSAGPERLTAETVLAAMSRGVSVTTPSP

SEQ ID NO: 307 - DNA, 1839 bp, Oryza sativa
  ref <308>: DATABASE ACCESSION NUMBER: LOC_Os01g62920
atgtcgtccgccgctgggggcggcgggtacggcggcggccagggtggaggcgcggagcaccaccaccaccaccacgggcacgccggtcacctcctgctccaccaccatccgcagcacgtggccggcgcggccgttgcggcagcggccgcggcggcgggcgggcagatgtaccacgtgccccagcacagccggcgcgagaagctccggttcccgccggacgccggggactcgccaccgcctcatggtcatggtcatggtcatgccccgcagcagcagcagcagcacgggtcgtggcctccgcccccggcgttctactcgtacgcgtcctcgtcgtcgtcgtactccccgcacagccctactctagcgcaggcgcagctggtggcgcacgggctggcgccgccgctcccgcagatcccgacgcagaacttctcgctgtcgctctcctccgcgtcgtcgaatcctccaccaccgcaggcgcagccgaggaggcagctcggcggcctcgcgcaggccacggggccgttcggtcccttcaccggctacgccgccgtgctcggccggtcccgtttcctcggcccggcagagaagctgttcgaggagatctgcgacgtcggcggcgctgcttcgcacgtcgaccgcaccatctccgacgagggcctgctcgacgcggatccgatggacggcgtcgatcatgacgtcgttgatcacgacctcggcggcgctgaccgcgcagcggccgacgctggccccatctcgggggccgagcagcagtggaagaagacgaagctcatctccatgatggaagaggtttgcaagaggtaccggcagtactaccagcaggttcaggctgtgatggcctcgttcgagaccgtcgccgggttcagcaacgccgcgccgttcgcggcattggcgctgagggcgatggcgaagcacttcaagtgcttgaagagcatgattctgaaccagctgcgcaacacgagcaacaaggtcgctgtgaaggacgggctaaacaaggagatcgccgtgttcgggctcgccgggggtagcagcggcggcgccggcctccagcgagcgaacagcgcgagcgcgttcggccagccgcacaatatttggcgcccacagagggggctccccgagcgcgctgtgtccgttttacgcgcgtggctgttcgaacacttcctgcacccgtatcctaccgatggtgataagcaaatgctagcaaaacaaacaggcttgacacgcaaccaggtatcgaactggtttatcaacgcaagggttaggttgtggaagccaatggtggaagaaattcacaacctagagatgaggcaaatgcacaagcactcggtggttgacaagggccagcatagcgtgcatcatcaggcccagcattcttcgcagtgcagcgggaatccctccgttccttcggactcccatcctggacagagcagcagcataactcggaaccacaacaccgctgcctcccagggcttcccggatgagctctcccagatgtcccagtccatccagggacaggtgagcttcgcatacaacgggctgacctcgcagcacaacattgcatcaccacatcatcagcaccagcaggtcggcggtgttggtatcggaggcggcaatggcggtgtctccctcacccttggtcttcaccagaacaacagggtctgcatcgccgagcctctcccggctgctctcccggccaacctagctcaccgtttcggactggaggaagtcagtgacgcctatgtgatgagctcatttggaggtcaggaccggcatttcgggaaggagattggtggtcacttgctgcatgattttgtcgggtga

SEQ ID NO: 308 - protein, 612 aa, Oryza sativa
  ref <308>: DATABASE ACCESSION NUMBER: LOC_Os01g62920
MSSAAGGGGYGGGQGGGAEHHHHHHGHAGHLLLHHHPQHVAGAAVAAAAAAAGGQMYHVPQHSRREKLRFPPDAGDSPPPHGHGHGHAPQQQQQHGSWPPPPAFYSYASSSSSYSPHSPTLAQAQLVAHGLAPPLPQIPTQNFSLSLSSASSNPPPPQAQPRRQLGGLAQATGPFGPFTGYAAVLGRSRFLGPAEKLFEEICDVGGAASHVDRTISDEGLLDADPMDGVDHDVVDHDLGGADRAAADAGPISGAEQQWKKTKLISMMEEVCKRYRQYYQQVQAVMASFETVAGFSNAAPFAALALRAMAKHFKCLKSMILNQLRNTSNKVAVKDGLNKEIAVFGLAGGSSGGAGLQRANSASAFGQPHNIWRPQRGLPERAVSVLRAWLFEHFLHPYPTDGDKQMLAKQTGLTRNQVSNWFINARVRLWKPMVEEIHNLEMRQMHKHSVVDKGQHSVHHQAQHSSQCSGNPSVPSDSHPGQSSSITRNHNTAASQGFPDELSQMSQSIQGQVSFAYNGLTSQHNIASPHHQHQQVGGVGIGGGNGGVSLTLGLHQNNRVCIAEPLPAALPANLAHRFGLEEVSDAYVMSSFGGQDRHFGKEIGGHLLHDFVG

SEQ ID NO: 309 - DNA, 3168 bp, Oryza sativa
  ref <308>: DATABASE ACCESSION NUMBER: LOC_Os06g09660
atgaaggatcagggatcatccggtgtgtctcccgccccaggggaaggggagaagaaagccatcaattcggagctatggcatgcttgtgccgggcctcttgtgtcgctgccgccggtgggcagtctcgtcgtgtacttccctcagggtcatagcgagcaggttgctgcttccatgcacaaggagctggacaacatccctggttatccctctcttccgtctaagctgatctgcaaacttctgagtctcaccttacatgcagattctgaaactgatgaagtttatgctcagatgacacttcaaccagtcaataaatatgatcgagatgcaatgctggcatctgaactgggcctgaagcaaaacaagcaaccagcggagttcttttgcaaaacgctgacggcgagcgacacaagtacccatggtggattttcagtgccacgtcgtgcggcggagaagatatttccaccactagactttaccatgcaaccaccagcacaagagctcatcgccaaggatctgcatgatatttcatggaaatttcgacacatttaccgaggtcaaccaaagaggcaccttctgacaactggttggagcgtctttgtcagcacaaaaaggcttctagctggtgattcagttctgtttataagggatgagaaatctcagcttctattaggcatacgtcgtgctaccagaccccaaccagctctatcgtcatcagttctatcaagtgatagcatgcacattgggattctagctgctgcagcacatgctgctgcaaacagtagcccatttactattttctacaatccaagggcaagtccatcagaatttgtcattcctttagcgaaatataacaaggctttgtatacacaagtatctcttggaatgcggttcagaatgctgtttgagacagaggattcaggggttcgaagatatatgggaacaatcacaggtattggtgacttggatccagtgcgctggaagaactctcattggcgaaaccttcaggttggttgggatgaatcaacagcatctgagaggcgcactcgtgtttcaatatgggagattgaaccagtcgcgacacctttttatatttgtccaccaccatttttcaggccaaaacttcctaagcagccaggaatgccagatgatgaaaatgaagttgagagtgctttcaaaagagccatgccatggcttgctgatgactttgccctgaaagatgtgcaaagtgcattatttccaggtctgagcctagtccaatggatggctatgcaacagaatcctcagatgctaacagctgcgtcccaaacagtgcaatcaccgtacttgaactccaatgcattggctatgcaggatgtgatgggtagtagcaacgaggacccaacaaaaagattgaacacacaggcacaaaatatggttttacctaatttacaggttggctcaaaagtggatcaccctgtaatgtctcaacatcaacagcagccacaccaactatcacaacagcagcaggtccagccatcgcagcaaagttctgtggttttacagcaacatcaagcccagttgctgcagcagaacgccattcacttgcagcagcagcaagaacatctccagcggcagcagtcacaaccggcacagcagttgaaggctgcttcaagtctgcattcagtggaacagcacaagctgaaagaacagacttcaggtgggcaggttgcctcacaagcacaaatgttaaaccagattttcccaccatcttcatcgcagctacaacagttaggtttacccaagtcacctactcatcgccaagggttgacaggattaccaattgcaggttctttgcagcagcccacactaactcagacatctcaagtccagcaagcagccgaatatcagcaggccctcctacagagtcagcaacagcaacagcaactgcaactgcaacaactatcacaaccagaagtacagctgcagctgcttcaaaagattcaacaacaaaacatgctatctcagctgaacccacaacatcagtcccagttgattcaacaattgtctcagaaaagccaggaaattctacagcaacaaattttgcaacatcaatttggtgggtctgattctattggtcaactcaagcaatcaccatcgcagcaagctcctttaaaccacatgacaggatctttgacgccccagcaacttgtcagatcacattcggcacttgctgagagtggggatccatccagttcaactgctccatccaccagccgtatttctccaataaattcgctgagtagggcaaaccaaggaagcagaaatttaactgacatggtggcaacaccacaaattgacaacttacttcaggaaattcaaagcaagccagataatcgaattaagaatgacatacagagcaaagaaacagtccctatacataaccgacatccagtttctgatcaacttgatgcatcatctgctacctccttttgtttagacgagagcccacgagaaggtttttccttccctccagtttgtttggataacaatgttcaagttgatccaagagataactttcttattgcggaaaatgtggacgcattgatgccagatgccctgttgtcaagaggtatggcttcaggaaagggcatgtgcactctgacttctggacaaagggatcacagggatgtcgagaatgagctatcatctgctgcattcagttcccagtcatttggtgtgcctgacatgtcctttaagcctggatgttcaagtgacgttgctgttactgatgccggaatgccaagccaaggtttgtggaataatcaaacacaacggatgagaactttcactaaggttcaaaagcgtggttctgtggggagatcaattgatatcacaagatatcgagattatgatgaacttaggcatgatcttgcatgcatgtttggtatccaaggtcaacttgaagatccatataggatggattggaagctagtctatgttgatcatgagaatgatatccttcttgtcggcgacgacccttgggaggaatttgtgggctgtgtgaagagcatcaaaatactctcagctgctgaagtacaacagatgagcttggatggtgaccttggtggcgtccctccacaaacacaggcctgtagtgcctctgatgatgcaaatgcatggagaggttga

SEQ ID NO: 310 - protein, 1055 aa, Oryza sativa
  ref <308>: DATABASE ACCESSION NUMBER: LOC_Os06g09660
MKDQGSSGVSPAPGEGEKKAINSELWHACAGPLVSLPPVGSLVVYFPQGHSEQVAASMHKELDNIPGYPSLPSKLICKLLSLTLHADSETDEVYAQMTLQPVNKYDRDAMLASELGLKQNKQPAEFFCKTLTASDTSTHGGFSVPRRAAEKIFPPLDFTMQPPAQELIAKDLHDISWKFRHIYRGQPKRHLLTTGWSVFVSTKRLLAGDSVLFIRDEKSQLLLGIRRATRPQPALSSSVLSSDSMHIGILAAAAHAAANSSPFTIFYNPRASPSEFVIPLAKYNKALYTQVSLGMRFRMLFETEDSGVRRYMGTITGIGDLDPVRWKNSHWRNLQVGWDESTASERRTRVSIWEIEPVATPFYICPPPFFRPKLPKQPGMPDDENEVESAFKRAMPWLADDFALKDVQSALFPGLSLVQWMAMQQNPQMLTAASQTVQSPYLNSNALAMQDVMGSSNEDPTKRLNTQAQNMVLPNLQVGSKVDHPVMSQHQQQPHQLSQQQQVQPSQQSSVVLQQHQAQLLQQNAIHLQQQQEHLQRQQSQPAQQLKAASSLHSVEQHKLKEQTSGGQVASQAQMLNQIFPPSSSQLQQLGLPKSPTHRQGLTGLPIAGSLQQPTLTQTSQVQQAAEYQQALLQSQQQQQQLQLQQLSQPEVQLQLLQKIQQQNMLSQLNPQHQSQLIQQLSQKSQEILQQQILQHQFGGSDSIGQLKQSPSQQAPLNHMTGSLTPQQLVRSHSALAESGDPSSSTAPSTSRISPINSLSRANQGSRNLTDMVATPQIDNLLQEIQSKPDNRIKNDIQSKETVPIHNRHPVSDQLDASSATSFCLDESPREGFSFPPVCLDNNVQVDPRDNFLIAENVDALMPDALLSRGMASGKGMCTLTSGQRDHRDVENELSSAAFSSQSFGVPDMSFKPGCSSDVAVTDAGMPSQGLWNNQTQRMRTFTKVQKRGSVGRSIDITRYRDYDELRHDLACMFGIQGQLEDPYRMDWKLVYVDHENDILLVGDDPWEEFVGCVKSIKILSAAEVQQMSLDGDLGGVPPQTQACSASDDANAWRG

SEQ ID NO: 311 - DNA, 654 bp, Oryza sativa
  ref <308>: DATABASE ACCESSION NUMBER: LOC_Os04g55920
atggatctgttggagaagaagaacattaagaaggggggagaagtggaggaggaggtggcgcgcaagggagaggagaggaaggaggaagaggtggtggtggaggagaagagccatcagcagcagcagcagcaaggggaggaggagctcgtcggcctctcgctcgccggcggcaggcccaaagtatttccaatgtcgagccctccacctaatccttcgcaacttacaattttctatggtggatcagtatgtgtttatgactcagtgccgccagagaaggctcaagcaatcatgcttattgccgcagcagctgctgcagcggcgtctgccaccaaaagcaatgctgccattgctgttaagccccctgtgatgcctgcagccaatgctacccaagcagcagtctctcctgtgctcacaagatcgctctcattgcagagcacttctgtagcaactggacaacctcaagttgccgctgaccctagctcaatttgcaagctccaggctgatctccccattgccaggaggcactcccttcagcgcttcctagagaaacgccgtgacagcaggttggtgagcaaagctccatatcccacaaaatcctccgagggcatggaagcatcagggatggaagtaactgctgagggcaaggcccagtaa

SEQ ID NO: 312 - protein, 217 aa, Oryza sativa
  ref <308>: DATABASE ACCESSION NUMBER: LOC_Os04g55920
MDLLEKKNIKKGGEVEEEVARKGEERKEEEVVVEEKSHQQQQQQGEEELVGLSLAGGRPKVFPMSSPPPNPSQLTIFYGGSVCVYDSVPPEKAQAIMLIAAAAAAAASATKSNAAIAVKPPVMPAANATQAAVSPVLTRSLSLQSTSVATGQPQVAADPSSICKLQADLPIARRHSLQRFLEKRRDSRLVSKAPYPTKSSEGMEASGMEVTAEGKAQ

SEQ ID NO: 313 - DNA, 1971 bp, Oryza sativa
  ref <308>: DATABASE ACCESSION NUMBER: LOC_Os08g44820
atgagccacccctcgtcgtcgtcctcctccgctcccccggcggcggccgaggccacctccctcgcaccgggattccggttccacccgacggatgaggagctggtgtcctactacctgaagcggaaggtccatgggcggccgctcaaggtggacgccatcgcggaggtggacctgtacaaggtggagccatgggacctccccgcccgctcccgcctccgcagccgcgactcccagtggtacttcttcagccgcctcgaccgcaagcacgccaaccgcgcccgcaccaaccgcgccaccgccggcggctactggaagaccaccggcaaggacagggaggtccgcaacggccccaccaccgtcggcatgaagaagaccctcgtcttccacgccggccgcgcccccaagggcgagcgcaccaactgggtcatgcacgagtaccgcctcgacggccaaaccaccatcccaccacaggattcattcgtcgtgtgccgtatcttccagaaagccggcccaggtccacagaacggggctcagtacggagctccttttgttgaggaggagtgggaggaggatgacgaggatgttggtttgctaccggtggaggagaaggacaactctgatgaccaggaaaaggaaatttctggtgctatggagaagggctatctccagatgagtgacctcgttcagaacttggttgatcaaaatgagaatggtaccattgccttgccagtttctgacaattcaaacaacagcaaccattctgaagacgtggatggaaattcaggggacattttaagtgaccaaaaccttgggtctaactttcttcaccatgttgagcctgtggagcaaaatggcctagtgcttaatgaaaatatgttttctagtgccaatgctggagacctttttaatatatctagccccaatgatggattcctagaactgaaggattttgcagatattgcagatttggagaatcctttagccaatgaatccaccatctggccttctgatggttggccctggaaatcaactgattccatggaggctgtgaatggggctagcaatgaattttctcccttagctggtgaacagatattccagccagaagaattggaacagttgttacagtcactgcaagaagactctcatatgggttcaactatctctgatcccccacattcatctataacaaatttagctaagccagaggaagattgtctaatgttctatgatgcaccctttgattcttcaatgtgtgatgatggttttagacagctcaatggatttcttggctccccatcgaccaatctatctggtattgacatggtggacgatggtatgccgtactatgatgcgatggatgataacttgtttaatgatcttctgagctcagtacagccatcagctggtagcagttcccatgcttttagtgggccagtccttactcaagaggtcaacaattcaacctatacatatagtccaactcaaaaggttttagaacctaattttgtagttggtgccccatcatctgctaggttacctgaagcgggtagtcagttaaattatgttgttttaccagattcccagaccaagagtagtctgatcgggaagcgttttgtaaagatactggattcaatctctgctccccctgcttttgcagcagcagagttcccagctagccttcgcaaatccttggctcctatttctggagctcatcacaacactatccgtgtctctgctgaagtaatcagcataggaagtttaactcctgattctcaagataagtggtcccttgagaaggatgaaggcatggagctgctcttctcggcaggttttgagcctgatacccgtgtacactttggctgcaacacaataaccgcagtactgcgtggtggcttctgcctcttcttcttttcagcaataatgctcttggtgagctacgaggtgggcatgtgcatctatggcaagtag

SEQ ID NO: 314 - protein, 656 aa, Oryza sativa
  ref <308>: DATABASE ACCESSION NUMBER: LOC_Os08g44820
MSHPSSSSSSAPPAAAEATSLAPGFRFHPTDEELVSYYLKRKVHGRPLKVDAIAEVDLYKVEPWDLPARSRLRSRDSQWYFFSRLDRKHANRARTNRATAGGYWKTTGKDREVRNGPTTVGMKKTLVFHAGRAPKGERTNWVMHEYRLDGQTTIPPQDSFVVCRIFQKAGPGPQNGAQYGAPFVEEEWEEDDEDVGLLPVEEKDNSDDQEKEISGAMEKGYLQMSDLVQNLVDQNENGTIALPVSDNSNNSNHSEDVDGNSGDILSDQNLGSNFLHHVEPVEQNGLVLNENMFSSANAGDLFNISSPNDGFLELKDFADIADLENPLANESTIWPSDGWPWKSTDSMEAVNGASNEFSPLAGEQIFQPEELEQLLQSLQEDSHMGSTISDPPHSSITNLAKPEEDCLMFYDAPFDSSMCDDGFRQLNGFLGSPSTNLSGIDMVDDGMPYYDAMDDNLFNDLLSSVQPSAGSSSHAFSGPVLTQEVNNSTYTYSPTQKVLEPNFVVGAPSSARLPEAGSQLNYVVLPDSQTKSSLIGKRFVKILDSISAPPAFAAAEFPASLRKSLAPISGAHHNTIRVSAEVISIGSLTPDSQDKWSLEKDEGMELLFSAGFEPDTRVHFGCNTITAVLRGGFCLFFFSAIMLLVSYEVGMCIYGK

SEQ ID NO: 315 - DNA, 675 bp, Oryza sativa
  ref <308>: DATABASE ACCESSION NUMBER: LOC_Os01g01870
atgaagagcaggaagaacagcacgacgagcacaaaagcagcaggcagctgccacaccagcagcagcggaggaggaggaggcggcggcaactgctatagcagcagcagtagcaagatggagcgcaaggatgtggagaagaatcggcgcctccacatgaagggtctctgcctcaagctctcctccctcatccccgccgccgctccccgccgccatcaccaccactactccacctcctcctcctcatcgccgccctcctccaccaaggaggctgtgacgcagctggatcacctggagcaggcggcggcgtacatcaagcagctcaaggggaggatcgacgagctgaagaagaggaagcagcaggcggcggcactcaccaccagcaccagcaatggcggcggcggcgggatgccggtggtggaggtgcggtgccaggatgggacgctggacgtggtggtggtgagcgaggcgatcagggaggagagggagagggcggtgcggctgcacgaggtgatcggcgtgctggaggaagaaggcgcggaggtggtgaacgccagcttctccgtcgtcggcgacaagatcttctacactctccactcccaggcgctctgctccaggatcggcctcgacgcctccagggtctcccacaggctgcgcaacctcctcctccaatattaa

SEQ ID NO: 316 - protein, 224 aa, Oryza sativa
  ref <308>: DATABASE ACCESSION NUMBER: LOC_Os01g01870
MKSRKNSTTSTKAAGSCHTSSSGGGGGGGNCYSSSSSKMERKDVEKNRRLHMKGLCLKLSSLIPAAAPRRHHHHYSTSSSSSPPSSTKEAVTQLDHLEQAAAYIKQLKGRIDELKKRKQQAAALTTSTSNGGGGGMPVVEVRCQDGTLDVVVVSEAIREERERAVRLHEVIGVLEEEGAEVVNASFSVVGDKIFYTLHSQALCSRIGLDASRVSHRLRNLLLQY

SEQ ID NO: 317 - DNA, 2523 bp, Oryza sativa
  ref <308>: DATABASE ACCESSION NUMBER: LOC_Os10g33960
atggcggcggcggtggcgatgcggagcggcagcggcagcgacggcggcggcggcgggtacgacaaggccgggatggactccggcaagtacgtgcggtacacgccggagcaggtggaggcgctggagagggtgtacgccgagtgccccaagcccagctcctcccgccgccagcagctgctccgcgactgtcccatcctcgccaacatcgagcccaagcagatcaaggtctggttccagaacagaaggtgccgagataagcagcggaaggaggcatcaaggcttcaggccgtgaaccgaaaattgacggcgatgaataagcttctcatggaggagaatgagcgtcttcagaagcaggtctcccagctggtccatgagaacgcgtacatgaagcagcaacttcagaatccgtcattgggcaatgatacaagctgtgaatcaaatgtgaccactcctcagaaccctctgagagatgcaagtaacccgtctggactccttacaattgcggaggagaccctgacagagttcctctccaaggctacagggactgctgttgattgggtgccaatgcctgggatgaagcctggtccggattcgtttggtattgtggccgtttcacatggttgccgtggtgttgctgcccgtgcctgtggtttggtgaatctagaaccaacaaagatcgtggagatcttaaaagaccgcccatcttggttccgtgattgtcgaagtcttgaagtcttcacaatgtttccagctggaaatggtggcacgatcgaacttgtttacatgcagatgtatgctcctactactttggttcctgcacgagatttttggacacttagatacacaactacaatggaggatggcagccttgtggtctgtgagagatcattgagtggttctggaggtggtccaagtacagcctccgcacagcaatttgtaagagctgagatgcttcctagcggctatctagtgcgcccatgcgagggtggtggctccatcgtgcatattgtggaccatctggatcttgaggcttggagtgttccagaagtgcttcggccactctacgagtcatctagggtagttgctcagaaaatgactactgcagcactacggcacatcagacaaattgctcaagagacaagcggggaggttgtatacgctttggggaggcaacctgctgttttgcggacatttagtcagaggttgagtagaggcttcaatgatgctataagtggtttcaatgatgatggttggtctgtcatgggtggggatggcattgaagatgtgatcattgcttgcaatgcaaagaaggttaggaatactagcacttcggccaatgcttttgtaactccaggaggtgttatatgtgctaaggcatccatgctactgcagagtgtcccacctgcagttttggttcgatttttgagggaacatcgttctgaatgggcggattataacttcgatgcatattcagcttcatctctgaagacaagctcatgttcacttcctgggttgcggcctatgagattttctgggagccagatcattatgccacttgctcacacggtggagaatgaggagattttagaagttgtccgtcttgaaggacaagcacttacacatgatgatggtcttatgtctagagatattcacctgcttcagctttgcactggaatagatgagaaatcaatgggatcctgcttccagcttgtctctgcaccaatcgatgagcttttccctgatgatgctccgttaatatcttcaggctttcgtgttataccgctggacatgaaaacagatggtacacctgctggtagaacattagatttggcatctagccttgaagttggttcaactgcacagcccacaggggatgcatctatggatgactgtaatctacgatcagtgctgacaattgcctttcagttcccttatgaaatgcatctccaagacagcgttgcaactatggcccggcaatatgtccgcagtattgtttcctctgttcagagagtatcaatggctatttctccttctcggtctggcttgaatgctgggcagaagataatttcaggcttccctgaagccccaacgctagctcgttggatttgccaaagctaccagttccatttgggggtggagttacttaggcaggcagatgatgctggggaagcactattgaaaatgctatgggattacgaagacgctattttgtgctgttctttcaaggaaaagcctgtgtttacttttgccaacgagatgggactaaacatgctagaaacatctctcgtcgctctccaagatctctcactggacaagatatttgatgaagccggtaggaaggccctatacaacgagatcccgaaattgatggaacagggttacgtgtacctgcctggtggagtgtgcttgtccgggatggggcgccatgtttctttcgagcaagctgtagcatggaaggtgctcggagaagacaacaatgtgcactgcctcgccttctgcttcgtcaactggtccttcgtgtga

SEQ ID NO: 318 - protein, 840 aa, Oryza sativa
  ref <308>: DATABASE ACCESSION NUMBER: LOC_Os10g33960
MAAAVAMRSGSGSDGGGGGYDKAGMDSGKYVRYTPEQVEALERVYAECPKPSSSRRQQLLRDCPILANIEPKQIKVWFQNRRCRDKQRKEASRLQAVNRKLTAMNKLLMEENERLQKQVSQLVHENAYMKQQLQNPSLGNDTSCESNVTTPQNPLRDASNPSGLLTIAEETLTEFLSKATGTAVDWVPMPGMKPGPDSFGIVAVSHGCRGVAARACGLVNLEPTKIVEILKDRPSWFRDCRSLEVFTMFPAGNGGTIELVYMQMYAPTTLVPARDFWTLRYTTTMEDGSLVVCERSLSGSGGGPSTASAQQFVRAEMLPSGYLVRPCEGGGSIVHIVDHLDLEAWSVPEVLRPLYESSRVVAQKMTTAALRHIRQIAQETSGEVVYALGRQPAVLRTFSQRLSRGFNDAISGFNDDGWSVMGGDGIEDVIIACNAKKVRNTSTSANAFVTPGGVICAKASMLLQSVPPAVLVRFLREHRSEWADYNFDAYSASSLKTSSCSLPGLRPMRFSGSQIIMPLAHTVENEEILEVVRLEGQALTHDDGLMSRDIHLLQLCTGIDEKSMGSCFQLVSAPIDELFPDDAPLISSGFRVIPLDMKTDGTPAGRTLDLASSLEVGSTAQPTGDASMDDCNLRSVLTIAFQFPYEMHLQDSVATMARQYVRSIVSSVQRVSMAISPSRSGLNAGQKIISGFPEAPTLARWICQSYQFHLGVELLRQADDAGEALLKMLWDYEDAILCCSFKEKPVFTFANEMGLNMLETSLVALQDLSLDKIFDEAGRKALYNEIPKLMEQGYVYLPGGVCLSGMGRHVSFEQAVAWKVLGEDNNVHCLAFCFVNWSFV

SEQ ID NO: 319 - DNA, 2619 bp, Oryza sativa
  ref <308>: DATABASE ACCESSION NUMBER: LOC_Os09g35760
atgagcttcggtggcatgttcgatggcgccggctccggcgtcttctcctacgacgccggcggcggcggcggcggcggcggagtacacaactcccgcctcctccctacgccgcccgtccccaagcccggcggcgggttcgccgctcccggcctctctctcggcctgcaaactatggacggtagccagctcggcgacgtgaaccggtcgcttgccatgatgggcaacggcgggagcggcagcggcggcgacggcgactcgctgggacgcggccgggaggaagagaacgacagccgctccggcagcgacaacctggacggcgcctccggcgacgaactcgacccggacaacagcaacccgcgcaagaagaagaagcgttatcaccgccacaccccgcagcaaatccaagaactcgaagccgtgttcaaggagtgtccacatcctgacgagaagcaacggatggagctcagccggcggctcaacctcgagagccgccaggtcaagttctggttccagaatcgccgcacccagatgaagcagacgcagatcgagcggcatgagaacgcgctgctgcggcaggagaacgacaagctgagggcggagaacatgacgatccgggaggcgatgaggaacccgatgtgcgcgagctgcggcggcgcggcggtgctcggcgaggtgtcgctggaggagcagcacctgcgcatcgagaacgcgcggctcaaggacgagctcgaccgcgtctgcgcgctcgccggcaagttcctcggccggccaatctcgagcatctcctccccgggcccgccgtcgctgcaggcgtgctccggcctcgagctcggcgtcggcagcaacggcgggttcgggctcggcgcgctcggggcctcggcggcgatgcagtccatccccgacctgatgggcggctcctccggcctgacgggggggcccgtgggctccgccgccatgcgcctacccgcgggcattggcggcctcgacggcgccatgcacgccgcggcggccgacggcggcgccatcgaccgcgccgtgctcctggagctcgccctcgcggccatggacgagctcgtcaaggtggcgcagatggacgagccgctctggctccccagcctcgacggcgggttcgagacgctcaactacgacgagtaccaccgcgcgttcgccagggtggtcggccagtgccccgccggctacgtctccgaggcgacgcgcgagtccggcatcgccatcatcagcagcgtcgacctcgtcgacagcctcatggacgcgccacggtggtcggagatgttcccgtgcgtggtggcgagagcgagcaccacggacatcatctccagcggcatgggcggcacgcgcagcgggtcaattcaactgatgcacgcggagctgcaggtgctgtcgccgctggtgccgatacgggaggtggtgttcctgcgtttctgcaagcagcacgccgagggcctctgggcggtggtcgacgtctcggtcgacgccgtcctccgccccgaccagaacggcggcggcgggtcgtcgtcgtcgtcgtacatgggctgccgcctcctccccaccggctgcatcgtgcaggacatgaacaatggctactccaaggtcacgtgggtggttcacgcggagtacgacgagacggcggcgcaccagctctaccggccgctgctccgctccggccaggccctcggcgcccgccgctggctcgcctcgctccagcgacagtgccagtatctcgccatcctctgctccaactccctccccgcccgcgaccacgctgcgataacgccggtggggaggaggagcatgctgaagctggcgcagcggatgacggacaacttctgcgcgggggtgtgcgcgtcggcggcgcagaagtggcggcgcctggacgagtggcgcggcgagggtgggggcggcggcggtggcggcggcggggacggggaggacaaggtgcggatgatggcgcggcacagcgtgggcgcgccgggggagccgccgggcgtcgtgctgagcgccaccacgtcggtgcggctccccggcacgctgccgcagcgcgtgttcgactacctccgcgacgagcagcggcgcggcgactgggacatccttgccaacggcgaggccatgcaggagatggaccacatcgccaagggccagcaccacggcaatgccgtctccctcctccgtccaaatgccacaagcgggaaccagaacaacatgctgatcctccaggagacgtgcaccgactcatcgggctccctcgtcgtctacgctccggtggacgtgcagtcgatgcacgtcgtcatgaacggcggcgactccgcctacgtctccctcctcccctccggcttcgccatcctccccgacggccacaacaatggcgcctcgccgtctccggcagaggtcggcagcggcgcctcgccgaactccgccgccggtggcggtggcggtagcaacaacaccgggtcgctggtgacggtggcgttccagatactcgtcaacaacctgccgacggcgaagctcaccgtggagtccgtcgacaccgtcagcaacctcctctcctgcaccatccagaagatcaagtcggcactgcaggccagcatcatctcaccatag

SEQ ID NO: 320 - protein, 872 aa, Oryza sativa
  ref <308>: DATABASE ACCESSION NUMBER: LOC_Os09g35760
MSFGGMFDGAGSGVFSYDAGGGGGGGGVHNSRLLPTPPVPKPGGGFAAPGLSLGLQTMDGSQLGDVNRSLAMMGNGGSGSGGDGDSLGRGREEENDSRSGSDNLDGASGDELDPDNSNPRKKKKRYHRHTPQQIQELEAVFKECPHPDEKQRMELSRRLNLESRQVKFWFQNRRTQMKQTQIERHENALLRQENDKLRAENMTIREAMRNPMCASCGGAAVLGEVSLEEQHLRIENARLKDELDRVCALAGKFLGRPISSISSPGPPSLQACSGLELGVGSNGGFGLGALGASAAMQSIPDLMGGSSGLTGGPVGSAAMRLPAGIGGLDGAMHAAAADGGAIDRAVLLELALAAMDELVKVAQMDEPLWLPSLDGGFETLNYDEYHRAFARVVGQCPAGYVSEATRESGIAIISSVDLVDSLMDAPRWSEMFPCVVARASTTDIISSGMGGTRSGSIQLMHAELQVLSPLVPIREVVFLRFCKQHAEGLWAVVDVSVDAVLRPDQNGGGGSSSSSYMGCRLLPTGCIVQDMNNGYSKVTWVVHAEYDETAAHQLYRPLLRSGQALGARRWLASLQRQCQYLAILCSNSLPARDHAAITPVGRRSMLKLAQRMTDNFCAGVCASAAQKWRRLDEWRGEGGGGGGGGGGDGEDKVRMMARHSVGAPGEPPGVVLSATTSVRLPGTLPQRVFDYLRDEQRRGDWDILANGEAMQEMDHIAKGQHHGNAVSLLRPNATSGNQNNMLILQETCTDSSGSLVVYAPVDVQSMHVVMNGGDSAYVSLLPSGFAILPDGHNNGASPSPAEVGSGASPNSAAGGGGGSNNTGSLVTVAFQILVNNLPTAKLTVESVDTVSNLLSCTIQKIKSALQASIISP

SEQ ID NO: 321 - DNA, 2067 bp, Oryza sativa
  ref <308>: DATABASE ACCESSION NUMBER: LOC_Os02g55320
atgagggcggcggaggagaggaagggtgtggtgccggcggcgaggaggagggaccagttccccgtcggtatgcgtgtcctcgccgtcgacgacgacccggtgtgtctcaaggtgctcgagaccctgctgctgcgctgccagtatcatgtgacgacaacaaatcaggctgctatcgcgctgaaaatgctgcgggaaaacagggacatgtttgatctagttatcagcgacgtccatatgccagacatggacggctttaagcttcttgagcttgtggggcttgaaatggacctccctgtcatcatgttatctgtgaatggagagaccaaaactgtattgaaggggataacccatggtgcctgcgactatctcctaaaacctgttcgaatcgaagagctcaggaatatctggcagcatgttatcaggaggaaattcagtactcgcgaccgtgctaatctcgatttctatgaagagtgcaacaagccaccaaatgcggattcagaccatgtgcatggccatgttacatgtggatcacctgatcaaagtgggaggcccagcaagaagaggaaggagtactgtagtgaagaggaggatgagggtgaggtcaatactcaagatattgatgatccctcggctccaaagaagccgagagttgtttggtcagttgaactacaccggaaatttgtcgctgctgtcaaccagcttggaattgacaaggctgtgccaaaaaggatacttgagctcatgaatgttgagaaactcacaagggaaaatgttgcaagtcacctacagaagtacaggctctatctcaaacggctaagcgctgtggcgtcgcaacaagttagcatcgttgctgctttgggaggtagagacccctttctgcacatgggtggatttgaaggactacagggttatcaagcttttacctcttccgcagctctatcatcttttactccacatggattgttaaacagtcctagaaacaatccagcagctcttggaactcagggggtacctgcttcaaaatcgattcagactatgagcggaagccatacattgagccattccattaatgatgcaaataagtaccaccttagcttaccaggaaaccagaaaggaaacttgggacaaggtttggcaacatcgcttgggcagacccaaatgcaacagaagtggatccatgaagaaaccgatgatctgtccaccatcctttctgggaatggcctatctaatggtatgtctggcacactccaaagtgtcacaagcagtcctttgctgcctcaagaactagccgagtgcacacaagccaaaattgtcagtcagccatcaattcgaacttcctctgtaagttcagaacatattgaaggcgccgttggagtttcatctggtctgcttgaatctcgtgtatcccagcagagtactattcctttatcaggattttccgccaacgggttgctaatccatggttcgtttaacaatacctgtgcaaacaaattgggtggtacatcttcatcgtgtgcacctgctcgctcttcaaatgaccttatggtagcaagagacacaaaaggtggagctagctcttttggtggcgcgatgcttttacctccagatacagagcaaaagtacttgaattttggaggtggaaacggtttgaaacagaagttcgatgataggactgcagacagtctgtttgatctcaagttcgtatggagttctgtaccgagctctcaattggcaagcaacattggggctcatcatgctatgagccaaagatggaacaatagcagtagtaacagtagcaatattggtgccagaatgattgggcaagcaacctcaagtggttcaacagttatcccacaaatgaagacagatttcctcgtttcgggagatatggcgatgccgaagaacgcctccgatttgagcatcccgaaacttcagagcgaacttagctctagcagctgcagcttcgacggccttctcaattccatagtcaaagtggagaaggatgatgttaccttcagcgacgacctggggtgcggcgatttctactcccttggagcttgcatatga

SEQ ID NO: 322 - protein, 688 aa, Oryza sativa
  ref <308>: DATABASE ACCESSION NUMBER: LOC_Os02g55320
MRAAEERKGVVPAARRRDQFPVGMRVLAVDDDPVCLKVLETLLLRCQYHVTTTNQAAIALKMLRENRDMFDLVISDVHMPDMDGFKLLELVGLEMDLPVIMLSVNGETKTVLKGITHGACDYLLKPVRIEELRNIWQHVIRRKFSTRDRANLDFYEECNKPPNADSDHVHGHVTCGSPDQSGRPSKKRKEYCSEEEDEGEVNTQDIDDPSAPKKPRVVWSVELHRKFVAAVNQLGIDKAVPKRILELMNVEKLTRENVASHLQKYRLYLKRLSAVASQQVSIVAALGGRDPFLHMGGFEGLQGYQAFTSSAALSSFTPHGLLNSPRNNPAALGTQGVPASKSIQTMSGSHTLSHSINDANKYHLSLPGNQKGNLGQGLATSLGQTQMQQKWIHEETDDLSTILSGNGLSNGMSGTLQSVTSSPLLPQELAECTQAKIVSQPSIRTSSVSSEHIEGAVGVSSGLLESRVSQQSTIPLSGFSANGLLIHGSFNNTCANKLGGTSSSCAPARSSNDLMVARDTKGGASSFGGAMLLPPDTEQKYLNFGGGNGLKQKFDDRTADSLFDLKFVWSSVPSSQLASNIGAHHAMSQRWNNSSSNSSNIGARMIGQATSSGSTVIPQMKTDFLVSGDMAMPKNASDLSIPKLQSELSSSSCSFDGLLNSIVKVEKDDVTFSDDLGCGDFYSLGACI

SEQ ID NO: 323 - DNA, 1944 bp, Oryza sativa
  ref <308>: DATABASE ACCESSION NUMBER: LOC_Os09g31454
atggcggacggatcggacggccccgacgtgtctccggcggcggcggcggcggcgggaggaggaggtggaggtgagatctgggggacgttggaggagctgctcttggcctgcgccgtgagcaggcacggcacggggagctgggactccgtcgccatggaggtgcagacgcggagccccctcgccgcgcgcccgggcctcacgcccaccagctgccgcctccggttccgccacctccaccgccgcttctccgtcggcggggcggcggaggaggacgacgacgacgaggaggcggaggagggtggccccgacgcctccgccgcggacgggtggatggacgagctccgccgcctccgcgtcgccgagctccgccgcgaggtcgagcgatgcgatctctccatcggaacgctacagacgaaagtgaagcggctgagagaggagagagaacaaagcatccacggcggcggcggcggcgaggggaagccggagacggcgaacggcgacgagcggctgtcgagcgaggagcccggccggtcgtgcagggagtccaattccacagatctgaaacccgcggcgcgcgccggtgaccatagcgtcaaggcggaggaggaagacgaggacgcggcggcggcgaagcagcaggcctccggcgagtcggtggccgcgtcgaaggagagcagcgacctgcggagctcggccagcctgcgccgccgccgccgctacaagcccggcgccgacgaggacgccgacggcgaggaggcctccgcgctgcggccgccctcgcagtcgccgtcgtcgtcgtcgtcgtcgcagccgctcgccgcgctgctcgacacgttcgccgccaggttcggtcccctgctcgagcggctgcacgaaagccaggagagcgacgcgtaccgtggcgcgatcaggcgccacgtggacatcgagatggtgcggcggaggctggacgcgtcgccggccggtggcggcggcggcggcgccgccgccgccgagttctaccgcgacctcctgctgctctgcgccaacgcgctcgtcttcttcccgcgcgccgggccggagcgcggcgccgccgcggaggcccgcgcgcttgtgtccgcgtcgctccgcctccgcgagccgaagcaggagcctggcaccgccgccgccgccgcggtggcggcggcggccgggtcccctccggctgaggatacgcggagagctgagggcgtcgtctccgtcggcggcggcggcggcggcgctggcatcgtcgggtcgctgatcgagaagggagggaagccgctcatcgtttgccggaagcggagctccatcgcgaaggccgcggcggcggcgaagaaggaggagagcgcggagaagggtgaggccgccgaggaaggggaggggagcgacgacggcgagaagaaggtctccgtgtcggcgtcagcgagcaaggacaaggcgtgggggttgaggacgaagaaaggccgcggccccggcaagaactcggccagcgtcggtggccggaaaatggccaagctctcggaagcgacggaggcagcgaccgacggaagcaagaagcccgacaagaagatcgccgccgacgcagccacgcccgccaagaagcggaacgccgtggacttcctcaaacggctaaaccagggctcgtcgccgtcgaagaagaagaagaaaggctcaccaatggggacacggaagcgtgctgcggcggcgacgtcgccggagcagccgcagaagacgcgtaaggggcccggcaggaaggatgccggccgcggcggctccaagaagggcggcaagagcgccacgccgaagagaagcgtggggcggccaccgtcgaagcgaggtgccgccgccgcaacgacgccgccgccgtcgaagagggccaaggtgaaccggtcggagaagacggcggcgacggcgacggcggcgaagcggggtgggaggaggtag

SEQ ID NO: 324 - protein, 647 aa, Oryza sativa
  ref <308>: DATABASE ACCESSION NUMBER: LOC_Os09g31454
MADGSDGPDVSPAAAAAAGGGGGGEIWGTLEELLLACAVSRHGTGSWDSVAMEVQTRSPLAARPGLTPTSCRLRFRHLHRRFSVGGAAEEDDDDEEAEEGGPDASAADGWMDELRRLRVAELRREVERCDLSIGTLQTKVKRLREEREQSIHGGGGGEGKPETANGDERLSSEEPGRSCRESNSTDLKPAARAGDHSVKAEEEDEDAAAAKQQASGESVAASKESSDLRSSASLRRRRRYKPGADEDADGEEASALRPPSQSPSSSSSSQPLAALLDTFAARFGPLLERLHESQESDAYRGAIRRHVDIEMVRRRLDASPAGGGGGGAAAAEFYRDLLLLCANALVFFPRAGPERGAAAEARALVSASLRLREPKQEPGTAAAAAVAAAAGSPPAEDTRRAEGVVSVGGGGGGAGIVGSLIEKGGKPLIVCRKRSSIAKAAAAAKKEESAEKGEAAEEGEGSDDGEKKVSVSASASKDKAWGLRTKKGRGPGKNSASVGGRKMAKLSEATEAATDGSKKPDKKIAADAATPAKKRNAVDFLKRLNQGSSPSKKKKKGSPMGTRKRAAAATSPEQPQKTRKGPGRKDAGRGGSKKGGKSATPKRSVGRPPSKRGAAAATTPPPSKRAKVNRSEKTAATATAAKRGGRR

SEQ ID NO: 325 - DNA, 2868 bp, Oryza sativa
  ref <308>: DATABASE ACCESSION NUMBER: LOC_Os07g37610
atgtcgtcgccggcgcagccgcccccgacgcggccgccggtggccgccccgcccccatccctcgcggcggcggcccccatctcggtgcagccgcccccgctccagccgaaaccgccgccgcatccgcagcagccgcctcaggcggtcgtctcggttggggttgggccgccgccgccgacgccgcagcatcagcagcagcagcagggcccccccggtcacgcgccgccgcagcagcggcccaggatctgcttcaacgcgcactgcaaggaccccaaatccgacggcccgcgccgccgcggatggcgactccgcaacggcgacttcgccgagctctgcgaccgatgctatcactcgttcgagcatgggggcttttgcgagactttccatttggaggttgccgggtggaggaactgcgaatcctgcgggaagaggctgcactgtgggtgcattgtgtcggtccatgcatttgttcacctcgacgccggaggggtcgagtgcgtcatgtgtgctcgcaagtcgcatgctgcaatggcaccaagtcagatatggtcatcttccatgcatatggctcaaaatgtagctgatagaaaagacaattttgtcaagagctggagacctcctgccgggcaattttcaagccagtggcggcagaataatatgtggagtatgtccaccatgcagtctgacttgcagcagcgcctagcttttgagtttgataggcctagtggcagtgaaaaattgcttccagggcgcacttttattcatgcccatgagaagaaatttgatgacatgcatgacagatcaacaacacctgctggcatgaaccagattatgagggagaggtatgccaatgggcatactcagcacaccaccctggatccgacgtacgcttacactctctatcacagagaaggaacaaatccaaatcttcatgaccatagtcaccatgcaggagaaaatgaccatttgactgcaaggaaaggagtaacttcagatccttgttcctctgtatctactaccttcaagcttgattcacaccatccgtccattttgaaagatgatccatcagccgtaccagctgggttgtcttctaatttttcatcagcaaatggcccaaaagaccatatcagaattggaccaactcagcagcagcagcaaatggcttcctcctcattgcagaaacaattctattcccatagtgtgattgataacgattttcaagcgcaattgcgcaatggaaggcctagaatggatgcaaaggcgagatctcagttgcttccacgctattggcctagaataacagatcaagagctacagcacctatctggagactcaaattctgttattacccctttgtttgagaaaatgttaagtgctagtgatgctggacggattggtcgtttggtgttgccaaagaaatgtgctgaggcgtacttccctgccatctctcaggcagaagggcttcccttaaaagttcaggatgctactggtaaggaatgggtgttccagttccgcttttggcccaataataacagcaggatgtatgtattggagggtgtcacaccttgcattcaatcgatgcagttacaagcaggcgatacagtaacctttagccgaatagatccagaagggaagctggtcatgggatttcgaaaggcaacaaatctttctgcagaacaggaccaacctacaaagcctgccaatggtgtactaccccctccagaagcaaataataaagttgttgtcccagattctagtcctaatgctgctgtacctcgaccaattaaagtcaacacagagagcaaaagttccagccctgtggaacaagccactgcctgtaaaattgacaaaggtgcattaccacaaaaggaagggccaggaacttcaagttcctccccactacctgtcaagagaaaggcaacttctgttggtccgaagatcaaacggttccacatggacagtgaggaatccatggaattgaagataacatgggaggaagctcaagaattacttcgtcctcctcctaaggccccttcaattgttgttgttgatggccatgagtttgaggaatatgaggagccaccaatacttgggaggaggacatattttgtgacagaccaatcaggtgagaatcatcaatgggctcaatgtgaggattgctctaagtggcgtaaactgccggtggacgcccttttgccctctaagtggacctgctctgacaataaatgggattctgaaaggtcttcctgtgattctgcccaagagataaatatggaggagcttggcgaaatgattcctatcaaacctggtgctgcaaaaaagaccaaagggaaggtagatactgacaatattgatgtttcagatgggctggacacactcgcaaatcttgcaattcttggtgaaggtgaatctctcccttcccagccaaccacaaggcatccccgccatcgccctggctgctcatgcatagtctgcatacaaccacccagcggaaagggaccaaagcacaaacagacgtgcacttgcaacgtctgtatgacagtgcgacgccgtttcaggacgcttatgatgcggcgcgagaagcgccagcagtcagagaaggactctggggtgcctcgcaaaagagagccaggtcaatccagcgagccagttccacaatctggctctggtgctcatccaaccagtactagctctcctcaccagagagcagataccaacggcgaaggtcctgaagacatgtccattgacaacaagaggacctcctctcctgtcaagaaccagattgacctgaacagtcagcctgagcgggaagacgagcagtcaccgaaatccgatgcgacgagactcctcagggacaacccaacctag

SEQ ID NO: 326 - protein, 955 aa, Oryza sativa
  ref <308>: DATABASE ACCESSION NUMBER: LOC_Os07g37610
MSSPAQPPPTRPPVAAPPPSLAAAAPISVQPPPLQPKPPPHPQQPPQAVVSVGVGPPPPTPQHQQQQQGPPGHAPPQQRPRICFNAHCKDPKSDGPRRRGWRLRNGDFAELCDRCYHSFEHGGFCETFHLEVAGWRNCESCGKRLHCGCIVSVHAFVHLDAGGVECVMCARKSHAAMAPSQIWSSSMHMAQNVADRKDNFVKSWRPPAGQFSSQWRQNNMWSMSTMQSDLQQRLAFEFDRPSGSEKLLPGRTFIHAHEKKFDDMHDRSTTPAGMNQIMRERYANGHTQHTTLDPTYAYTLYHREGTNPNLHDHSHHAGENDHLTARKGVTSDPCSSVSTTFKLDSHHPSILKDDPSAVPAGLSSNFSSANGPKDHIRIGPTQQQQQMASSSLQKQFYSHSVIDNDFQAQLRNGRPRMDAKARSQLLPRYWPRITDQELQHLSGDSNSVITPLFEKMLSASDAGRIGRLVLPKKCAEAYFPAISQAEGLPLKVQDATGKEWVFQFRFWPNNNSRMYVLEGVTPCIQSMQLQAGDTVTFSRIDPEGKLVMGFRKATNLSAEQDQPTKPANGVLPPPEANNKVVVPDSSPNAAVPRPIKVNTESKSSSPVEQATACKIDKGALPQKEGPGTSSSSPLPVKRKATSVGPKIKRFHMDSEESMELKITWEEAQELLRPPPKAPSIVVVDGHEFEEYEEPPILGRRTYFVTDQSGENHQWAQCEDCSKWRKLPVDALLPSKWTCSDNKWDSERSSCDSAQEINMEELGEMIPIKPGAAKKTKGKVDTDNIDVSDGLDTLANLAILGEGESLPSQPTTRHPRHRPGCSCIVCIQPPSGKGPKHKQTCTCNVCMTVRRRFRTLMMRREKRQQSEKDSGVPRKREPGQSSEPVPQSGSGAHPTSTSSPHQRADTNGEGPEDMSIDNKRTSSPVKNQIDLNSQPEREDEQSPKSDATRLLRDNPT

SEQ ID NO: 327 - DNA, 1188 bp, Oryza sativa
  ref <308>: DATABASE ACCESSION NUMBER: LOC_Os06g16370
atgaattataattttggtggcaacgtgttcgaccaggaggttggagttggaggcgaaggaggaggaggaggagaggggagcggctgcccatgggcgcggccgtgcgacgggtgccgcgcggcgccgagcgtggtgtactgccgcgcggacgcggcgtacctgtgcgcgtcgtgcgacgcgcgggtgcacgcggccaaccgcgtggcgtcccgccacgagcgcgtgcgggtgtgcgaggcctgcgagcgcgccccggccgcgctcgcgtgccgcgccgacgccgccgcgctgtgcgtggcgtgcgacgtgcaggtgcactccgcgaacccgctcccggccatcaccatcccggccacctccgtcctcgctgaggcggtggtggccaccgccaccgtcctcggcgacaaggacgaggaggtggactcttggcttctcctctccaaagattccgacaacaacaacaacaataacaacaacaacgacaacgacaataacgacaacaacaacagcaacagcagcaacaacggcatgtattttggtgaagtcgatgagtactttgatcttgtcgggtacaattcgtactacgacaaccgcatcgaaaacaaccaagatcggcagtatgggatgcatgaacagcaagagcagcagcagcagcagcaggagatgcaaaaggagtttgcagagaaggaagggagcgagtgtgtggtaccttcacagatcacaatgctgagtgagcagcagcatagtggttatggagttgtgggagcagaccaggccgcctccatgaccgccggcgtcagtgcttacacagattccatcagcaacagcatatctttctcatcaatggaggcgggtatagtaccagacagcacggtgatagatatgccaaattccagaatcctgacacctgctggagcaatcaatctcttctcaggtccctcgcttcagatgtcccttcacttcagctccatggacagggaggccagggtgctcaggtacagggagaagaagaaggccaggaagtttgagaagacaatacgttatgaaacaagaaaggcgtatgcagaggcacgaccccggatcaagggccgtttcgccaagagatcagatgtgcagatcgaagtggaccagatgttctccactgcagctctatctgacggtagctatggtactgttccatggttctga

SEQ ID NO: 328 - protein, 395 aa, Oryza sativa
  ref <308>: DATABASE ACCESSION NUMBER: LOC_Os06g16370
MNYNFGGNVFDQEVGVGGEGGGGGEGSGCPWARPCDGCRAAPSVVYCRADAAYLCASCDARVHAANRVASRHERVRVCEACERAPAALACRADAAALCVACDVQVHSANPLPAITIPATSVLAEAVVATATVLGDKDEEVDSWLLLSKDSDNNNNNNNNNDNDNNDNNNSNSSNNGMYFGEVDEYFDLVGYNSYYDNRIENNQDRQYGMHEQQEQQQQQQEMQKEFAEKEGSECVVPSQITMLSEQQHSGYGVVGADQAASMTAGVSAYTDSISNSISFSSMEAGIVPDSTVIDMPNSRILTPAGAINLFSGPSLQMSLHFSSMDREARVLRYREKKKARKFEKTIRYETRKAYAEARPRIKGRFAKRSDVQIEVDQMFSTAALSDGSYGTVPWF

SEQ ID NO: 329 - DNA, 1374 bp, Oryza sativa
  ref <308>: DATABASE ACCESSION NUMBER: LOC_Os07g38030
atgctccagggagtcctgtcgcgagctcccggcgccgacgcggcagcgatgaaggcgaagcgcgcggccgacgacgaggaggaaggcggcgagcgggagcgcgcgcgtgggaagcggctggctgctgaggggaagcaagggttagtggtggtgagtacgggggaggaggaggaggcggcggcggagacgcgtgggctgcggctgcttagtttgttgctgaggtgtgcggaggcggtggcgatggaccagctgccggaggcgcgggacctgctgccggagatcgccgagctggcgtcgccgttcgggtcgtcgcccgagcgcgtcgcggcctacttcggggacgcgctgtgcgcgcgcgtgctgagctcctacctgggggcctactcgccgctggcgctccgcccgctcgccgccgcgcagagccgccgcatctccggcgcgttccaggcgtacaacgcgctgtcgccgctcgtcaagttctcgcacttcacggccaaccaggccatcttccaggcgctcgacggcgaggaccgcgtccacgtgatcgacctcgacatcatgcaggggctgcagtggccgggcctcttccacatcctcgcctcccgccccaccaagccgcgctcgctccggatcaccggcctcggcgcgtcgctcgacgtcctcgaggccaccggccgccgcctcgccgacttcgccgcgtcgctcggcttgcccttcgagttccggcccatcgaggggaagatcgggcacgtcgccgacgccgccgcgctcctcggcccgcgccaccacggggaggccaccgttgtgcactggatgcaccactgcctctacgacgtgacgggctccgacgccggcacggtgcgcctgctcaagagcctccggccgaagctgatcaccatcgtggagcaggacctcggccacagcggcgacttcctgggccgcttcgtggaggcgctgcactactactcggcgctgttcgacgcgctgggcgacggcgcgggggccgccgaggaggaggcggcggagcggcacgcggtggagcgtcagctcctcggcgcggagatacggaacatcgtcgccgtcgggggccccaagcgcaccggcgaggtgcgcgtcgagcggtggggcgacgagctgcggcgagcggggttccggccggtgaccctggccggcagccccgccgcgcaggcgaggctgcttcttggcatgtacccatggaagggctacactctcgtcgaagaggacggctgcctcaagctcgggtggaaggacctgtccctgctcaccgcctcgtcgtgggagccgacagacggcgacgccgacgccgacgtcgccgtcgccggcgatacccaccatgagagccacgattcttga

SEQ ID NO: 330 - protein, 457 aa, Oryza sativa
  ref <308>: DATABASE ACCESSION NUMBER: LOC_Os07g38030
MLQGVLSRAPGADAAAMKAKRAADDEEEGGERERARGKRLAAEGKQGLVVVSTGEEEEAAAETRGLRLLSLLLRCAEAVAMDQLPEARDLLPEIAELASPFGSSPERVAAYFGDALCARVLSSYLGAYSPLALRPLAAAQSRRISGAFQAYNALSPLVKFSHFTANQAIFQALDGEDRVHVIDLDIMQGLQWPGLFHILASRPTKPRSLRITGLGASLDVLEATGRRLADFAASLGLPFEFRPIEGKIGHVADAAALLGPRHHGEATVVHWMHHCLYDVTGSDAGTVRLLKSLRPKLITIVEQDLGHSGDFLGRFVEALHYYSALFDALGDGAGAAEEEAAERHAVERQLLGAEIRNIVAVGGPKRTGEVRVERWGDELRRAGFRPVTLAGSPAAQARLLLGMYPWKGYTLVEEDGCLKLGWKDLSLLTASSWEPTDGDADADVAVAGDTHHESHDS

SEQ ID NO: 331 - DNA, 1344 bp, Oryza sativa
  ref <308>: DATABASE ACCESSION NUMBER: LOC_Os04g58020
atgtccgcgtctgcatccgctgtctgtctccttcctccccgaggaggaagcctggcccgacccgacaccgcactccccccagccagccagccagccactgtcgcggtgaaccaaaatatcccccgcctcgcctcgcctcgcctcgcggtaacatccatcacactcctcccccgccgcggccgccgctgcgcggtagatctcctcctcctccacctccaccgtctcctgctcttcctctctctcttctcggaggaaacccccaatttattccttccccgcaaacccgcagccttcctaaaacgaattaaatctccctcccttatccgccgctgcaatccctccccacaaaatctcgctgcgccgcgcgctgttttagggtttgagctcatggcggtggaggaggcgagcagcagcagtggcggcggtcgtggtgggggtggcggtgggggtggggaggaggggttgtccggttgcggcggtgggtggacgcgcgagcaggagaaggcgttcgagaacgcgctggcgacggtgggggatgacgaggaggaaggggacgggttgtgggagaagctagcggaggccgtggaggggaagacggccgacgaggtgaggcggcactacgagctgctggtggaggacgtcgacggcatcgaggccgggcgggtgccgctcctggtgtacgccggcgacgggggcgtcgaggagggctctgcgggaggtgggaagaaggggggtggtgggggaggaggtggaggtggaggggggcatggggagaaggggtcggctaagtcctctgagcaggagcgccggaaggggatcgcctggacggaggacgagcacaggctgttccttcttggacttgagaagtacggcaaaggcgactggaggagtatctcaagaaactttgtgatctcaaggacacccacccaagtagctagtcatgcacagaagtattttattcgcctgaactcaatgaacagagagaggcggcgatcaagtatacatgacataaccagcgtgaacaatggagatacatctgctgctcaggggccaatcacaggtcagccaaatggcccatcagcaaatcctggaaaatcctctaagcagtctctacagccagcaaatgcgcctccaggcgtcgatgcttatggtacgacaattggacagccagttggtggtcctcttgtgtccgcagttggcactcctgttacacttcctgttcctgctgcacctcatatagcctatggcatgcatgcccctgtccctggagctgtagtccctggtgccccagtaaacatgcctccaatgccctaccccatgccgccaccaacatctcatggatga

SEQ ID NO: 332 - protein, 447 aa, Oryza sativa
  ref <308>: DATABASE ACCESSION NUMBER: LOC_Os04g58020
MSASASAVCLLPPRGGSLARPDTALPPASQPATVAVNQNIPRLASPRLAVTSITLLPRRGRRCAVDLLLLHLHRLLLFLSLFSEETPNLFLPRKPAAFLKRIKSPSLIRRCNPSPQNLAAPRAVLGFELMAVEEASSSSGGGRGGGGGGGGEEGLSGCGGGWTREQEKAFENALATVGDDEEEGDGLWEKLAEAVEGKTADEVRRHYELLVEDVDGIEAGRVPLLVYAGDGGVEEGSAGGGKKGGGGGGGGGGGGHGEKGSAKSSEQERRKGIAWTEDEHRLFLLGLEKYGKGDWRSISRNFVISRTPTQVASHAQKYFIRLNSMNRERRRSSIHDITSVNNGDTSAAQGPITGQPNGPSANPGKSSKQSLQPANAPPGVDAYGTTIGQPVGGPLVSAVGTPVTLPVPAAPHIAYGMHAPVPGAVVPGAPVNMPPMPYPMPPPTSHG

SEQ ID NO: 333 - DNA, 1128 bp, Oryza sativa
  ref <308>: DATABASE ACCESSION NUMBER: LOC_Os03g50110
atggcctcggaccaaaccctccccgtcccggtctcggtcgagctgccccccgccgcgcccaaccctcctgacccgaccgcacccctcctcccgcacgcggacgacccctccgcaccccccgccgccgccgccgccgcccgcaagctccccgtcaagcgccgctccccgccgccgcgcccctcctccccctcctcctccgacccggcctcctccgaccccgccgccaagcagcagcctcagcagccgccgccgccgttcaagttccagcggatttggtccgagtccgacgagctccgcttcctgcagggcctcctcggctgcggcgcgcaggggctcgtcttcccgcgggacctcaacgtcttctacgaccgcttctccgagtccatgccctcgccctacacccgctcccagctctccgagaagctccgccgcctcaagaacaagttccgcggcatgtccgcccgcgtcgcacggggcctcgaccccgcccgcctcgcgccgcacgaccgcgacgtgctccacctctgctcccgcctctgggaccccgccaacgccgccacctcgcccttcgccgccgccggtgacgcctcctcggggaacaagcgccgccgcgccgccccgcgcgccgggccgctcatgcccccggatccctcaggggacagcaattcccatgattacaacggcggtattagcgccggtacgcccggcgcatttggggatgggcacggtggtgaggaaatgatgtatcttgagcaggaaagtgggcactttggttatcatggagatgtcgcgattgcggctgacggaagccttgatgggattgtgaaggtgcagcctgagactcttcctgccctccccagtatcggggacattgcggttcacagtgagaatggcaacggcaaggccgtggtgccacgtagcaatgagcatcacatggcaaatgccgtgctggatatatttgaggagtgcttgcgagaggtgaaggccaatggcattacctacggtgctaatgtgaatgggggcagtgaacttgcaaggcgatggagagcacagaggattgatgagcttgatgtgttgagccggaggctaaggttgcttgttgaggatgctgcagcggctggtcgctaa

SEQ ID NO: 334 - protein, 375 aa, Oryza sativa
  ref <308>: DATABASE ACCESSION NUMBER: LOC_Os03g50110
MASDQTLPVPVSVELPPAAPNPPDPTAPLLPHADDPSAPPAAAAAARKLPVKRRSPPPRPSSPSSSDPASSDPAAKQQPQQPPPPFKFQRIWSESDELRFLQGLLGCGAQGLVFPRDLNVFYDRFSESMPSPYTRSQLSEKLRRLKNKFRGMSARVARGLDPARLAPHDRDVLHLCSRLWDPANAATSPFAAAGDASSGNKRRRAAPRAGPLMPPDPSGDSNSHDYNGGISAGTPGAFGDGHGGEEMMYLEQESGHFGYHGDVAIAADGSLDGIVKVQPETLPALPSIGDIAVHSENGNGKAVVPRSNEHHMANAVLDIFEECLREVKANGITYGANVNGGSELARRWRAQRIDELDVLSRRLRLLVEDAAAAGR

SEQ ID NO: 335 - DNA, 2169 bp, Oryza sativa
  ref <308>: DATABASE ACCESSION NUMBER: LOC_Os01g48060
atggtgggcatcgacctcaacaccgtggaggaggaggaagacgaggaggagggcggcgccaccggcaccgtcacggcgcctgcggaggcgagggcggggggcgcggtgtgcctggagctgtggcacgcctgcgctggccccgtggcgccgctgccgcggaagggcagcgccgtcgtgtacctgccgcagggccacctcgagcacctcggggccgcgcccggctccggccccggcgccgcggtgccgccgcacgtgttctgccgcgtcgtcgacgtcagcctccacgcggacgccgcgacggacgaggtgtacgcgcaggtctcgttggtcgccgacaacgaggaagtggagaggcggatgcgggagggagaggacggcgcggcctgcgacggcgagggcgaggacgccgtgaagcggccggcccggattccccacatgttctgcaagacgctcacggcctccgacaccagcacgcacggcggcttctccgtgcctcgccgcgccgccgaggactgcttcccgccgctggactacagcctgcagaggccattccaggagctcgtggcaaaggatctgcacggcacggaatggaggttcagacatatctatcgaggccaaccacggaggcaccttttaaccactggatggagcgggtttatcaacaagaagaagctagtatctggggatgcagtgctattcctcagaggtgaagatggagagcttcgattgggagtgcgccgagctgctcagctaaaaaatgcatctccttttcctgcacttcataaccagatctcaaatactagtagtcttagtgaagttgcacatgctgtggccgtgaaaagtatttttcacatctactacaatcccagttgtactcacaggttaagtcagtctgagttcattataccatattggaagtttatgagaagcttcagtcaacccttttctgttggaatgcgattcaaattgagatatgagagtgaggatgcttctgaaagaaggcgtactggaataataattggaagcagagaggcagatccaatgtggcatggttcgaagtggaaatgtttagtggtgaaatgggatgatgatgtggagtgccgtcggcctaatggggtatctccttgggagattgagcttagtggatcagtttcaggatctcatctgtccactccccattcaaaacggctgaaatcatgcttcccccaagttaatccagatattgtgcttccaaatggaagtgtttcttcagattttgcggagtctgccagattccacaaggtcttgcaaggtcaagaattgttgggtttaaaaactcgtgatggtactgttaatacagcttctcaggcgactgaggcaagaaattttcagtacactgatgaacgaagttgctctatcaacatgagtaacaatatcttaggggttccgagacttggggtgaaaactccaagtggaaaccctgggttttcctaccattgctcaggctttggggaatctcaaagattccaagaggtcttgcaaggtcaagaagtgtttcgtccttaccgaggagggactttgtccgatgcctgtataagaggttctggcttccgtcaacctgatggcaaccatgcacctggtgcagcatttaaatggcttgcaccacaaggatgtgatcatcatgggataaccacatcagttctgccgcaagcatcctctccatcatctgtcttaatgtttccacaaactagttcaaagatgcctggccttgaatacatatacggatgcctggatagaaatgagaatagccgacattttaagattggacctacacaagatatgacaagaactgatcaaacattacgactctggcctcatcttatttcaggcaaagtgctagatgagtgtacgagaaatgagaagctgcactctccagtcagtggtgctgagcatgaatcaaataacaagtgtcttaatacaaatggctgcaaaatctttggtatatcattgactgaaaaggcccaagcaggcgatgaagtggattgtggcaatgccagttatcattctcggctccagtctttaaaaccacagatgccaaaatcattgggcagcagttgtgccacggtccatgaacaaaggcctgttgttggcagggtcgttgatatttcagcagtgaatacgatgatctga

SEQ ID NO: 336 - protein, 722 aa, Oryza sativa
  ref <308>: DATABASE ACCESSION NUMBER: LOC_Os01g48060
MVGIDLNTVEEEEDEEEGGATGTVTAPAEARAGGAVCLELWHACAGPVAPLPRKGSAVVYLPQGHLEHLGAAPGSGPGAAVPPHVFCRVVDVSLHADAATDEVYAQVSLVADNEEVERRMREGEDGAACDGEGEDAVKRPARIPHMFCKTLTASDTSTHGGFSVPRRAAEDCFPPLDYSLQRPFQELVAKDLHGTEWRFRHIYRGQPRRHLLTTGWSGFINKKKLVSGDAVLFLRGEDGELRLGVRRAAQLKNASPFPALHNQISNTSSLSEVAHAVAVKSIFHIYYNPSCTHRLSQSEFIIPYWKFMRSFSQPFSVGMRFKLRYESEDASERRRTGIIIGSREADPMWHGSKWKCLVVKWDDDVECRRPNGVSPWEIELSGSVSGSHLSTPHSKRLKSCFPQVNPDIVLPNGSVSSDFAESARFHKVLQGQELLGLKTRDGTVNTASQATEARNFQYTDERSCSINMSNNILGVPRLGVKTPSGNPGFSYHCSGFGESQRFQEVLQGQEVFRPYRGGTLSDACIRGSGFRQPDGNHAPGAAFKWLAPQGCDHHGITTSVLPQASSPSSVLMFPQTSSKMPGLEYIYGCLDRNENSRHFKIGPTQDMTRTDQTLRLWPHLISGKVLDECTRNEKLHSPVSGAEHESNNKCLNTNGCKIFGISLTEKAQAGDEVDCGNASYHSRLQSLKPQMPKSLGSSCATVHEQRPVVGRVVDISAVNTMI

SEQ ID NO: 337 - DNA, 591 bp, Oryza sativa
  ref <308>: DATABASE ACCESSION NUMBER: LOC_Os03g15940
atgtttagcgggacgcagcagaagtgcaaggtgtgcaccaagacggtgtacccgatggaccagctctccaccgacggcgtcgtcttccaccgctcctgcttcaagtgccaacactgcaagtccaccctctcccttggcaactactcctcgattgaaggagtgccatactgcaagccccatttcgagcaactgttcaaggagaccgggagctacaacaagagcttccaatcacccgcgaaacccgcatcggagaagttgactcctgagctgacaagatcacctagcaaagccgcacgcatgttttcagggacacaggagaagtgtgccacttgcagtaaaacagcgtatcctctagagaaggtgacagttgaaggacaggcctaccacaagtcctgcttcaaatgttctcacggtggctgtgccatttcgccatccaattatgcagctttggaaggtatcctatactgcaagcaccatttctcccaacttttcaaggagaaagggagctacaaccatctgatcaaatgcgcatcagtcaagcgcgccgaagcacagccggcaccaccaccggccgctgcagattcctcctga

SEQ ID NO: 338 - protein, 196 aa, Oryza sativa
  ref <308>: DATABASE ACCESSION NUMBER: LOC_Os03g15940
MFSGTQQKCKVCTKTVYPMDQLSTDGVVFHRSCFKCQHCKSTLSLGNYSSIEGVPYCKPHFEQLFKETGSYNKSFQSPAKPASEKLTPELTRSPSKAARMFSGTQEKCATCSKTAYPLEKVTVEGQAYHKSCFKCSHGGCAISPSNYAALEGILYCKHHFSQLFKEKGSYNHLIKCASVKRAEAQPAPPPAAADSS

SEQ ID NO: 339 - DNA, 699 bp, Oryza sativa
  ref <308>: DATABASE ACCESSION NUMBER: LOC_Os01g72330
atgacggtggttgatgcggagtcgcggttccatgtcctcgcggtggatgatagcctgatcgacaggaagctcatcgagatgctgctcaagaactcgtcctaccaagtgaccactgtggattctgggagcaaggccttggagctgcttggattgagggatgagggtgatgactcctcctcttcaccttcttcctcctcacctgaccatcaggagattgatgtcaacctgataatcactgactactgcatgcctggcatgacagggtatgatctgctcaagagggtgaagggatcatcttcattgaaggacataccagttgtgatcatgtcttctgagaatgtgcctgcaaggatcaacaggtgcttggaagatggtgcagaggagttcttcctgaaacctgtcaagctcgctgacatgaagaagctcaagtctcacctgctcaaaaggaaacagcagctgcccatggctgctgctgcaccagataagccgccacacaaaccagatgaagctgcagcctcagcagctgcaattgctgaagctgcaacagctcaaaccgatggaatcatcagtgattgcagctgcagcggcagcagcaagaggaaggcggctgcaatggagcaggaggtcatctcctcacctgatcagaggacgaagccaagattgtcctccactagcagcggccttgcagtggagacctga

SEQ ID NO: 340 - protein, 232 aa, Oryza sativa
  ref <308>: DATABASE ACCESSION NUMBER: LOC_Os01g72330
MTVVDAESRFHVLAVDDSLIDRKLIEMLLKNSSYQVTTVDSGSKALELLGLRDEGDDSSSSPSSSSPDHQEIDVNLIITDYCMPGMTGYDLLKRVKGSSSLKDIPVVIMSSENVPARINRCLEDGAEEFFLKPVKLADMKKLKSHLLKRKQQLPMAAAAPDKPPHKPDEAAASAAAIAEAATAQTDGIISDCSCSGSSKRKAAAMEQEVISSPDQRTKPRLSSTSSGLAVET

SEQ ID NO: 341 - DNA, 1119 bp, Oryza sativa
  ref <308>: DATABASE ACCESSION NUMBER: LOC_Os06g41770
atgacatggcacattcaagccctcccattggccatgccacggcaccaccccgcgtgggccccaccacctcccttcgccgaaactttcccctcctccttcctcccgaagcaaaatccgagcatctccgacgagtccgccatatttaaacacacccacgagcggcaacccaccgcgagagacaaaaatatctccatcgcgatctccatggatgtagagttcttcgccgacctcgacctcgacgcgctcctcgcctccttctcctcctccgccgccgccgccggctccggcgtctcgggcctcttcgccccgtcaccgccgcacgatgcggaggcggggtcgccggagtcggtgagctcccggcggcccagcccttcccgggaggcggcgctgtcggagatcgagaggttcctgatggaggagggccccgcggcggaggagggggtcggcgcggaggatttcttcgacgcgctgctcgtcgacggcggggaggaggaggaggaagaagaggggaaggggagtgaggcggggggaagcacggatggggattccgggaaggagaatgaggtggctaccccggacgcggagaaggaggatgtggaggcggaggtggatggcgatgatcccatgagcaagaagaagaggaggcagatgagaaatagggattctgccatgaaatcgagggagaggaagaagatgtatgttaaggacctagagactaagagcaagtatctagaggccgagtgtcgtcgcctcagctacgcgcttcagtgctgcgcagctgagaacatggcgctgcgccagagcttgttgaaggataggcctgtcggtgccgccacagccatgcaggagtctgccgtactcacggaaaccctgccgctggtttccctgctttggctcgtgagcatcgtgtgcctactcccggtgcccggtctacccaaccgaaacccggtggctcgaagcagcgccggaagagatctcgcgacggtaaccggaaagaagacaagcagtgaacaacagctagaagaaacattactactccatgggaggcgttgcaagggctcgagggcgaggatcaagctagataccggaccgttccgtttagcagcagctgcttgctag

SEQ ID NO: 342 - protein, 372 aa, Oryza sativa
  ref <308>: DATABASE ACCESSION NUMBER: LOC_Os06g41770
MTWHIQALPLAMPRHHPAWAPPPPFAETFPSSFLPKQNPSISDESAIFKHTHERQPTARDKNISIAISMDVEFFADLDLDALLASFSSSAAAAGSGVSGLFAPSPPHDAEAGSPESVSSRRPSPSREAALSEIERFLMEEGPAAEEGVGAEDFFDALLVDGGEEEEEEEGKGSEAGGSTDGDSGKENEVATPDAEKEDVEAEVDGDDPMSKKKRRQMRNRDSAMKSRERKKMYVKDLETKSKYLEAECRRLSYALQCCAAENMALRQSLLKDRPVGAATAMQESAVLTETLPLVSLLWLVSIVCLLPVPGLPNRNPVARSSAGRDLATVTGKKTSSEQQLEETLLLHGRRCKGSRARIKLDTGPFRLAAAAC

SEQ ID NO: 343 - DNA, 1701 bp, Oryza sativa
  ref <308>: DATABASE ACCESSION NUMBER: LOC_Os04g57800
atgaatgagctctgcgacctcaaggtgcacatcaatggccatcacacgcttcttcttcatcagagcgtcatgtgtgcgttctcggggaggttgaggacaatggtgacgcaggagaagaagaagaggaagacgagccgggcggagagcctgtccgtcaagctcgccgacttccccggcggcggcgaggggttcgagctcgtggccaggttctgctacaacaatggccgcgtcccgctctgcccgtccaacctcccgctcctgcactgcgccgccgtgttcttggagatgaccgaggaggtgtgcacctgcaacctcctgacccaagcagaggcattcgtggacggcctctactactggacatgggccgacgtcctcgccgccgtcaagagctgcgagccattcgccgcggcggccgacgcctccggcctcctcgagaggctcatctccgcgctgttctccaagatcaccgccaatccggagacgcccgtcgccgcgggggcagtcgggacgccgaaccgctcgtcgtcgtcgtgctcgtcgtcgccggacacgctcgggttcggccggtcgtcgtccaccaagacgcccgagtcgatgaagccgtgcttcgccagggagtggtggttcgacgacatgacgtcgctgtgcccgcagaccatcgagaaggcgatgagggtgctcggctgctacggcatcgagaacaagaacctgatcctgacgcggttcctgctgcactacctccgcgccgccacgcgcaggccggcgctgtgcagggagggcggcggcggactcgccggactcgccgacacggccgtgcacggcgtggcgctcgtcggcggcaccgcgttctcgtgccggggcctcttctgggtgctccggatcgtgtcggccgtggggctgagcaaggagtgcaggcacaaactggagaggctcatggggctgatgctggaccaggccacgctcgacgacctcctcgtctccggcgacgacggtggcgtgtacgacgtgaacctggtcatgcggctggtcagggtgttcgtcggctccgaggaggaggccgacttgccgtcgcagaggatgaggaaggttggaaggctggtcgacaagtacctcggtgagatctcgccggaccatggcctgagggtgtccaagttcctcgccgtcgccgagagcctgccggactcggctcgggaatgctacgacggcgtgtacagggcattggatatctaccttgagtctcacccgacgctgaccatcgaggagcggacgacgctatgccggtgcctcaactacgagaagctgacgctggaggcgtgcaaggacctggccaagaaccggaggatcccgccggggatcgccgtgcaggcgctagcctcgcagcagtccaagctccagatcagacccgccgccgccgcggcgaagggcaccggcggctgcaggcctgacccgtcgcagacgccgaggaagatcatcgtcagcggcagccgcgcccggagcgtggacctggacgccatggacgagaaggagctgctcaagctgaacctgcagaagatgcagaatcgggtggtggagctggagagagcgtgcaaggagatgcgagggcagatgtccaagatggccaagggcggcaggccgtcgtcgtcgttcggcgccgccgcctgccatcaaaccggcggtagaggcttgcctaggctgtgctaa

SEQ ID NO: 344 - protein, 566 aa, Oryza sativa
  ref <308>: DATABASE ACCESSION NUMBER: LOC_Os04g57800
MNELCDLKVHINGHHTLLLHQSVMCAFSGRLRTMVTQEKKKRKTSRAESLSVKLADFPGGGEGFELVARFCYNNGRVPLCPSNLPLLHCAAVFLEMTEEVCTCNLLTQAEAFVDGLYYWTWADVLAAVKSCEPFAAAADASGLLERLISALFSKITANPETPVAAGAVGTPNRSSSSCSSSPDTLGFGRSSSTKTPESMKPCFAREWWFDDMTSLCPQTIEKAMRVLGCYGIENKNLILTRFLLHYLRAATRRPALCREGGGGLAGLADTAVHGVALVGGTAFSCRGLFWVLRIVSAVGLSKECRHKLERLMGLMLDQATLDDLLVSGDDGGVYDVNLVMRLVRVFVGSEEEADLPSQRMRKVGRLVDKYLGEISPDHGLRVSKFLAVAESLPDSARECYDGVYRALDIYLESHPTLTIEERTTLCRCLNYEKLTLEACKDLAKNRRIPPGIAVQALASQQSKLQIRPAAAAAKGTGGCRPDPSQTPRKIIVSGSRARSVDLDAMDEKELLKLNLQKMQNRVVELERACKEMRGQMSKMAKGGRPSSSFGAAACHQTGGRGLPRLC

SEQ ID NO: 345 - DNA, 885 bp, Oryza sativa
  ref <308>: DATABASE ACCESSION NUMBER: LOC_Os05g43760
atgacaagcaataacagcacgaatgaggagctcggcggcggcggcaggaaggcggccgacaagccgagcggcggcggcggcgccgccgccgccgtggcgagctcgcggcactggtcggcgtcgacggagtcgcggatcgtgcgcgtgtcgagggtgttcggcggcaaggaccgtcacagcaaggtgaggacggtgaaggggctccgcgaccggcgggtgcggctgtcggtgccgacggcgatccagctctacgacctgcaggaccggctggggctcagccagccgagcaaggtggtcgactggctgatcaacgccgcccaggccgagatcgacaagcttccgccgctccagttcccgccgcacgaccacgacctcgtcgccgccgccgcctcgtccatggcgccgccgccgttcgcgaacggaggcgacggccaccacggcgcctccgcgtcgtcgatgctggaggacggcgacaaggccgccggcggcggcggcatgaaggcgttcatgagcctgagcaactccctcggcctgctcaacgccgccaccatgccggcgacgttggccgctcaccaccaccaccatcatcacgccgcggcgtactacgccgccgccgaatcttggggcaacggcggcaatggtggccaccaccatgatgtcagccatggcgtctcgccttcggctcacaactcgccgttcccgtcgctgctgtccttggcaccgggctctcatcatcagttcgtcttctactcgccggaaggcggcggattcgccgtgaaagaggctgcagccgagcagtttcctgtagatagcctcgaccactcgcaagggcagctcacactgagctcagcaagaagcttccttcactctggaagccagggatga

SEQ ID NO: 346 - protein, 294 aa, Oryza sativa
  ref <308>: DATABASE ACCESSION NUMBER: LOC_Os05g43760
MTSNNSTNEELGGGGRKAADKPSGGGGAAAAVASSRHWSASTESRIVRVSRVFGGKDRHSKVRTVKGLRDRRVRLSVPTAIQLYDLQDRLGLSQPSKVVDWLINAAQAEIDKLPPLQFPPHDHDLVAAAASSMAPPPFANGGDGHHGASASSMLEDGDKAAGGGGMKAFMSLSNSLGLLNAATMPATLAAHHHHHHHAAAYYAAAESWGNGGNGGHHHDVSHGVSPSAHNSPFPSLLSLAPGSHHQFVFYSPEGGGFAVKEAAAEQFPVDSLDHSQGQLTLSSARSFLHSGSQG

SEQ ID NO: 347 - DNA, 1503 bp, Oryza sativa
  ref <308>: DATABASE ACCESSION NUMBER: LOC_Os01g61720
atgggtaagaaaggaaattggttcagtgctgtcaagaaagtcttcagctcatccgatccagatgggagggaagctaagatcgagaaggcggacaagtcgagatccaggaggaaatggccatttggaaagtctaagaagtctgatccttggacctcaacagtggcagtgcctacctctacagcaccgcctccacagccgccaccgccaccgccaacacaccctatccagccacagcctgaggagatcaaagatgtcaaggctgttgaaactgacagtgaacagaacaagcatgcgtactctgttgcacttgcctctgctgttgctgcagaagctgctgccgtcgctgcccaggccgctgctgaggtggtccgcctcacaacagccaccacggctgtgccgaaatcgcctgttagttcaaaggatgagcttgccgctatcaagattcagactgccttcaggggttatctggcaagaagagcgctgcgagcacttagagggctagttagattgaagtcgctggttgatggaaacgccgtcaaacgacaaactgcgcacaccttgcattgcacacaaaccatgaccagagttcaaactcaaatatactctagaagggtgaagatggaggaggaaaaacaggctcttcaaaggcagctacaattaaagcatcagagggaacttgagaaaatgaagattgatgaagattgggatcatagccatcagtccaaggagcaggttgagaccagcctaatgatgaaacaagaagctgcgctaaggcgggaaagagctcttgcctatgcattttctcaccagtggaagaattctggccgaactataacacctaccttcacggatcaagggaatcctaactggggatggagctggatggaacgctggatgacatcaaggccttgggagagccgagtgatatcagataaggatcctaaggaccattattcaacaaagaatcccagcactagcgcttctcgtacttatgtaccccgcgcaatctcaatccagagacctgcaacaccaaacaagtcaagccgtccaccaagtcggcaatcgccatcaactcccccgtcaagggtcccctcagttaccggaaagatcagaccagcaagtccacgggatagctggctatataaggaggatgacttgaggagcatcacaagcatacgctctgaacgcccaaggaggcagagcacaggtggtgcctctgttcgggatgatgcgagcctaacaagcacaccagctctccccagctacatgcagtccacagagtctgcaagggcgaagtctcggtaccgcagtctattgactgacaggtttgaggttcctgagagagtacccctggtccattcttcaataaagaagcgcttatccttcccagtcgcagacaaaccaaatggtgagcatgcagataagctgatggaaagagggaggcgtcattcagaccctcctaaggtggatcctgcctcactgaaggatgttccggtttcataa

SEQ ID NO: 348 - protein, 500 aa, Oryza sativa
  ref <308>: DATABASE ACCESSION NUMBER: LOC_Os01g61720
MGKKGNWFSAVKKVFSSSDPDGREAKIEKADKSRSRRKWPFGKSKKSDPWTSTVAVPTSTAPPPQPPPPPPTHPIQPQPEEIKDVKAVETDSEQNKHAYSVALASAVAAEAAAVAAQAAAEVVRLTTATTAVPKSPVSSKDELAAIKIQTAFRGYLARRALRALRGLVRLKSLVDGNAVKRQTAHTLHCTQTMTRVQTQIYSRRVKMEEEKQALQRQLQLKHQRELEKMKIDEDWDHSHQSKEQVETSLMMKQEAALRRERALAYAFSHQWKNSGRTITPTFTDQGNPNWGWSWMERWMTSRPWESRVISDKDPKDHYSTKNPSTSASRTYVPRAISIQRPATPNKSSRPPSRQSPSTPPSRVPSVTGKIRPASPRDSWLYKEDDLRSITSIRSERPRRQSTGGASVRDDASLTSTPALPSYMQSTESARAKSRYRSLLTDRFEVPERVPLVHSSIKKRLSFPVADKPNGEHADKLMERGRRHSDPPKVDPASLKDVPVS

SEQ ID NO: 349 - DNA, 1899 bp, Oryza sativa
  ref <308>: DATABASE ACCESSION NUMBER: LOC_Os02g57650
atgagccaatcgccgccggactcctcctccgcggcggcggtgcccctggcgccggggtttcgcttccaccccaccgacgaggagctcgtctcctactacctccgccgccgcatcctcggccgccgcctccggatcgacgccatcgccgaggtcgacctctaccgcctcgagccgtgggacctcccctccctctcccgcatccggagccgcgacgcgcagtggtacttcttcgcccgcctcgaccgcaaggtcaccggcgccggggccggcggccgcggcggccccgggaacaggaccaaccgcgccacgccgcgcggctactggaagaccaccgggaaggaccgcgatgtccaccaccgcggcaagctcgtcgggatgaagaagacgctcgtcttccactccggtagggcgcccaagggccagaggaccaactgggtcatgcacgagtaccgcctcctcgacgccgacggcacccaggatctgcatgtggtgtgtagaatcttccagaaaaatggatctgggccacaaaatggtgcacagtacggtgcgccatacttggaggaagattgggaagaggaggatgatgcaattgagaacatgcctgccagtggcgctttcgctgaaatggctgcagtcacagatactgcagatgagtcgactgaggaagatgggaatttctcccttaaaactaatgatgagcctttacaaacccaagaataccagccagagataactcctgtgaaagctcaaggttcaaatgaggagaccaatggcggtggttacagttgtgatgttttttctctggatgagattttgcaggaacctgaaaatgtctgcaaaaatgaagagcagaatgccattgatgacaagttcactatcgcagagttatctggatacccaaggcaagatgatggctatgtaggcgagaatggtcctgtgaattggattgacccttcaaatggtgataatacaaactggcctttgagagcatatagtactcagaaccatgtcaatggaacacttagcgctgatggtttctttgacacggtgaatggtaccaactcatattcaggtccttcagataaccagaacctgtatttgcaagatgatggcttgacttcttctcatcaagtgggcgataacatgccattttatgacgcatcatctaatcacaaatgggtagatggaaaggatgattatttgaatttgaatgacctcctctacccgccagcagaaaatcaacccctgtttgatgctggggatgacctgatggcttacttcgatgccacggaggatgatttcaaatttgatattatgggcacagaagattctaattctcaacttccagacatgtcgaactttgtccaaaaggatgataacaacaataagtttacattagatgggatctctaataccgctttgtatggtgcttcttcatctggatcccatggcaatatgtatccagacactgcagtaccagatatgccgatggatgacactgttgacaaaagtttcggaaagcgccttgccagcatgctgggttcaattccagctccacccgcaatggcttcagagttcccgccgagcacaggaaaatctgttgtcccacttagtgctgtcaacccgagtagctctatccgtgtcactgcaggcattatccaactcggtggtatcacttttactggtagcaccgagcacctgcagaagaatggagatttcaatttgctcctctctttcactgtcgagggcgacgtctcaaccaaatccattggttttgaaccggatacgcagatgagcaccacgccaatggtgttgcgcagcggcatgtatcttttcttcgtatcggcgatgattctcatgttgagctacaaagttgggctgtgtatctacagcaggtaa

SEQ ID NO: 350 - protein, 632 aa, Oryza sativa
  ref <308>: DATABASE ACCESSION NUMBER: LOC_Os02g57650
MSQSPPDSSSAAAVPLAPGFRFHPTDEELVSYYLRRRILGRRLRIDAIAEVDLYRLEPWDLPSLSRIRSRDAQWYFFARLDRKVTGAGAGGRGGPGNRTNRATPRGYWKTTGKDRDVHHRGKLVGMKKTLVFHSGRAPKGQRTNWVMHEYRLLDADGTQDLHVVCRIFQKNGSGPQNGAQYGAPYLEEDWEEEDDAIENMPASGAFAEMAAVTDTADESTEEDGNFSLKTNDEPLQTQEYQPEITPVKAQGSNEETNGGGYSCDVFSLDEILQEPENVCKNEEQNAIDDKFTIAELSGYPRQDDGYVGENGPVNWIDPSNGDNTNWPLRAYSTQNHVNGTLSADGFFDTVNGTNSYSGPSDNQNLYLQDDGLTSSHQVGDNMPFYDASSNHKWVDGKDDYLNLNDLLYPPAENQPLFDAGDDLMAYFDATEDDFKFDIMGTEDSNSQLPDMSNFVQKDDNNNKFTLDGISNTALYGASSSGSHGNMYPDTAVPDMPMDDTVDKSFGKRLASMLGSIPAPPAMASEFPPSTGKSVVPLSAVNPSSSIRVTAGIIQLGGITFTGSTEHLQKNGDFNLLLSFTVEGDVSTKSIGFEPDTQMSTTPMVLRSGMYLFFVSAMILMLSYKVGLCIYSR

SEQ ID NO: 351 - DNA, 2295 bp, Oryza sativa
  ref <308>: DATABASE ACCESSION NUMBER: LOC_Os03g49170
atgtttttgctgatggcttcagttcttccgatccgacaagccccgatgaacggcacgccgatctccgcgtccgccgcggccggcgtcgacggagtcggcgcggcggtggcgctggcggccgcgaccaagaagagtgccgccgcggcggccgccgtcgccgagatggcgaaaaccctcaccgtcgacacggacgacgccttcgcggggctcctcgagctcgccgcggacgacgacgcggagggcctgcgccgcgcgctggagcgcgccccgcccgccgccgcggacgaggcgggcctctggtacggccgccgcaaggtcctcgagcaccgcacgccgctgatggtcgcggccacctatggcagcctcgcggtgcttcgcctgctgctgtccctcccgtccgtcgatgtcaatcgccgctgtggctccgacggcaccaccgccctccactgtgcggcgtctggtggctcgccgtcttgtgtggaggccgtcaagctgctgcttgctgctggggctgatgctgatgccacggatgcttccggatatcgtccagctgatgtgatctctgttcctccaaagatgtttgacgccaagattgccctccaagatcttcttggatgcccaaaggctgggcatggcgttctccgggtggtgacaagggccgcaaactctatgttgtcacctgtatcatcccctacagcagaagatgcacgatctccatcagctgctgtgatgatgacgacaaagtttgcagatcttccaagggttgtgacatcggaaaagaaagaatatccagtggatccgtcccttcccgatatcaagaacagcatctatgcttccgatgagttccgcatgtactcatttaagatcaggccatgctcgcgggcgtactcacatgattggactgagtgcccgtttgttcacccaggggagaacgcacggcgtcgggaccctcgcaagtatcactacagctgtgtgccatgccccgactttagaaagggagtttgccggcgtggtgacatgtgtgaatatgctcatggcgtgttcgagtgttggctccatccagcacagtaccgtactcgcctttgcaaggatggcacaagctgtaatcgccgtgtctgtttctttgcgcatacaactgatgagctccgaccactatatgtttccactggatctgcagtaccatccccaagagcctcggcaacagctacaatggagatggctgcagcaatgggcttgatgcctggttctccatcatcagtttcagcagtcatgtccccatttacaccaccaatgtccccttcaggcaatgggatgcccccttcattgggctggcagcagccaaatgttccgacactacaccttccaggcagcagccttcagtcgagccggctccgtacctcacttagtgcaagggatatgcctgctgatgattactccctgatgcaggatattgattcacagcttataaatgatttgtgctattcacgtattggttcatcaacaggaaaccacacgtctcggaccaagtccctaaatccgtcaaacttggatgatctcttctctgctgagatggtctcttccccgaggtatagtaatgctgatcagggtggtatgttttcaccatctcacaaggctgctttccttaatcagttccagcaacagcagcaggcacttctttcaccaatcaacacagtcttctccccgaagtctgtggacaaccagcagttgccttcacactcatctctgttgcaagcatcacttggtatatcctcccctggccgcatgtctcctcgatgtgttgaatctgggtcccctatgaactctcatcttgctgctgctcttgctcagcgtgagaagcaacagcagacaatgagaagtctcagttctcgtgatcttgggccgagtgctgcaagagcatcaggtgttgttggctcccctctaagctcatcatggtcaaagtggggatcaccttcagggacacctgactggggtgttaatggtgaagaattgggcaagcttcgccggtcatcatcgtttgagctgagatctggtggtgatgatccagatctctcttgggtacacacactggttaaggaatctccaccagagaagcaagtcactactgctgaatccataaactctgttggaccttcaccactgatgcctcccagtgtaagcaacggtgaaggtcctagtctgaatgccccgctggatgggcatgaccaagctgctgttattggagcattgcttgaacagatgcagcttgatcagcatattggtagtctagcaacataa

SEQ ID NO: 352 - protein, 764 aa, Oryza sativa
  ref <308>: DATABASE ACCESSION NUMBER: LOC_Os03g49170
MFLLMASVLPIRQAPMNGTPISASAAAGVDGVGAAVALAAATKKSAAAAAAVAEMAKTLTVDTDDAFAGLLELAADDDAEGLRRALERAPPAAADEAGLWYGRRKVLEHRTPLMVAATYGSLAVLRLLLSLPSVDVNRRCGSDGTTALHCAASGGSPSCVEAVKLLLAAGADADATDASGYRPADVISVPPKMFDAKIALQDLLGCPKAGHGVLRVVTRAANSMLSPVSSPTAEDARSPSAAVMMTTKFADLPRVVTSEKKEYPVDPSLPDIKNSIYASDEFRMYSFKIRPCSRAYSHDWTECPFVHPGENARRRDPRKYHYSCVPCPDFRKGVCRRGDMCEYAHGVFECWLHPAQYRTRLCKDGTSCNRRVCFFAHTTDELRPLYVSTGSAVPSPRASATATMEMAAAMGLMPGSPSSVSAVMSPFTPPMSPSGNGMPPSLGWQQPNVPTLHLPGSSLQSSRLRTSLSARDMPADDYSLMQDIDSQLINDLCYSRIGSSTGNHTSRTKSLNPSNLDDLFSAEMVSSPRYSNADQGGMFSPSHKAAFLNQFQQQQQALLSPINTVFSPKSVDNQQLPSHSSLLQASLGISSPGRMSPRCVESGSPMNSHLAAALAQREKQQQTMRSLSSRDLGPSAARASGVVGSPLSSSWSKWGSPSGTPDWGVNGEELGKLRRSSSFELRSGGDDPDLSWVHTLVKESPPEKQVTTAESINSVGPSPLMPPSVSNGEGPSLNAPLDGHDQAAVIGALLEQMQLDQHIGSLAT

SEQ ID NO: 353 - DNA, 1161 bp, Oryza sativa
  ref <308>: DATABASE ACCESSION NUMBER: LOC_Os05g44400
atggaggtggcggcggcggactacgccggcggggtccgtgtcaagaaggaggccggaggctgcggcggcagcggggacatgttcctcgtcgatgacctcctcgacctgccgtgcgacgaggaggaggaggagacggggttgtgcggggcgtacggcggcggcggcgccggcctgggagcgggcgtcgtcggaggtggcggggatgaccgcgcggccgggaacgcgtcggccgactcgtcgacggtgacggccgtcgacagctgcagcaactcattctccggcctcgccgacggggacttctccggcgggctgtgcgagccgtatgaacaactcgcggagctggaatgggtgtccacctacatgggcgaggagaccttgcccacggaggatctccggaagcttcagctcatctccggcatccccgccgcgccgcgcgcgccgcccgctctggccgtctccgcggtgcagctgccggcaggaggcgccggcgcgctgcccacggaggcgcccgtgccggggaaggcgcggagcaagcggtcccgcgtcgcgccgtgcagctggtcgtcgcgcctgatggtcctgccgccgccgccggcgtcgccgccgtccccggcgtcggcggtcatctcgccgtccgagtcgggcaccgcggcgccggcattcccggccaagaaggcggcgaagtccgccaagaagaaggacgggccgtcccccgcgccggcgccgaacgcggccgcgcaggcggcggcggaggggaggaggtgcctccactgcgagacggacaagacgccgcagtggaggacggggcccatgggtcccaagacgctgtgcaacgcgtgcggggtgcggtacaagtccgggcggctcgtgccggagtaccggccggcggcgagcccgacgttcgtggtgtccaagcactccaactcccaccgcaaggtggtggagctgcggcgccagaaggagatgcagctcctgcaccaccaccagcagccgccgccgcacgtgggcgcgggcggcggcggcgccgccggagggctgctccacgtgacgagcccgctgctgttcgacgggccgacgtcgtcggcgccgctcttcgccggcgcggacgaattcctgatccataaccgcataagcccggactaccggcgccaggctacctag

SEQ ID NO: 354 - protein, 386 aa, Oryza sativa
  ref <308>: DATABASE ACCESSION NUMBER: LOC_Os05g44400
MEVAAADYAGGVRVKKEAGGCGGSGDMFLVDDLLDLPCDEEEEETGLCGAYGGGGAGLGAGVVGGGGDDRAAGNASADSSTVTAVDSCSNSFSGLADGDFSGGLCEPYEQLAELEWVSTYMGEETLPTEDLRKLQLISGIPAAPRAPPALAVSAVQLPAGGAGALPTEAPVPGKARSKRSRVAPCSWSSRLMVLPPPPASPPSPASAVISPSESGTAAPAFPAKKAAKSAKKKDGPSPAPAPNAAAQAAAEGRRCLHCETDKTPQWRTGPMGPKTLCNACGVRYKSGRLVPEYRPAASPTFVVSKHSNSHRKVVELRRQKEMQLLHHHQQPPPHVGAGGGGAAGGLLHVTSPLLFDGPTSSAPLFAGADEFLIHNRISPDYRRQAT

SEQ ID NO: 355 - DNA, 957 bp, Oryza sativa
  ref <308>: DATABASE ACCESSION NUMBER: LOC_Os01g60020
atggaaatggcggcggcggttgggggcagcgggaggagggacgcggaggcggagctgaacctgccgccgggcttccgtttccacccgaccgacgaggagctcgtggtgcactacctctgccgcaaggttgcccggcagccgctccccgtcccaatcatcgccgaggtcgacctctacaagctcgacccctgggatctccctgagaaggcgttgttcgggaggaaagagtggtacttcttcacgccgagggaccggaagtacccgaacgggtcgaggccgaaccgcgcagcggggagagggtactggaaggcgacgggagccgacaagccggtggcgcccaaggggagcgcgaggacggtggggatcaagaaggcgctcgtgttctactccgggaaggcgccgaggggggtcaagacggactggatcatgcacgagtaccgcctcgccgacgccgaccgcgccccgggcggcaagaagggctcacagaagctggacgagtgggtgctgtgccggctgtacaacaagaagaacaactgggagaaggtgaagctggagcagcaggacgtggcctccgtggcggcggcggcgccgcgcaaccaccaccatcagaacggcgaggtcatggacgcggcggcggctgacaccatgtccgacagcttccagacgcacgactccgacatcgacaacgcctccgccggcctgcggcacggtggctgcggcggcggcggcttcggcgacgtggcgccgccgaggaatgggttcgtgacggtgaaggaggacaacgactggttcaccggcctcaacttcgacgagctgcagccgccgtacatgatgaacctgcagcacatgcagatgcagatggtgaatccggcggcgccagggcacgacggcggctacttgcagtccatcagctcgccgcagatgaagatgtggcagacaatcctgccaccattctga

SEQ ID NO: 356 - protein, 318 aa, Oryza sativa
  ref <308>: DATABASE ACCESSION NUMBER: LOC_Os01g60020
MEMAAAVGGSGRRDAEAELNLPPGFRFHPTDEELVVHYLCRKVARQPLPVPIIAEVDLYKLDPWDLPEKALFGRKEWYFFTPRDRKYPNGSRPNRAAGRGYWKATGADKPVAPKGSARTVGIKKALVFYSGKAPRGVKTDWIMHEYRLADADRAPGGKKGSQKLDEWVLCRLYNKKNNWEKVKLEQQDVASVAAAAPRNHHHQNGEVMDAAAADTMSDSFQTHDSDIDNASAGLRHGGCGGGGFGDVAPPRNGFVTVKEDNDWFTGLNFDELQPPYMMNLQHMQMQMVNPAAPGHDGGYLQSISSPQMKMWQTILPPF

SEQ ID NO: 357 - DNA, 1467 bp, Oryza sativa
  ref <308>: DATABASE ACCESSION NUMBER: LOC_Os08g42440
atgaaggatggtggtggaggaggagggagggggcagcagcagcagtggccttgcgactactgcggggaggcggcggcggcgctgcactgcagggcggacgccgcgaggctgtgcgtcgcctgcgaccgccacgtgcacgccgccaacgcgctctcgcggaagcacgtccgcgccccgctctgcgccgcctgcgccgccaggccggccgccgcgcgcgtcgcctccgcctcggcgccggcgttcctgtgcgcggactgcgacaccgggtgcggcggcgacgacggcgcggccttgcgggtgcccgtcgaggggttctccgggtgccccgccgccgccgagctcgccgcgtcgtgggggctcgacctccccggcggctgcggcggcgaggaggaggaggccgacgacgcgttcttctcggcgctcgactactccatgctcgccgtcgaccccgtgctgcgcgacctctacgtgccatgcgacccgcccgaggtggtggtggccggcggcgggcggcgactcaagggggaggcgctcggccaccagctcgccgagatggcgcgccgggaggccgagacggcgcacccgcacacgcagccgcactcggatctgagcccccgcacgcctcgccggacctccgccgcggcgagcggccgcctgcaggaaaagcaagctcccccgccgttgcctcatgctgctgcgacggcggcgccgctgccgtacacttcactgctcatgatggcgccggccaactgcaccgagctcatggaaaacaaccgtgttggagacgaagatgaaaatgttctgtgggagagcaccgcgccatcagtgccaccaacccagatatgggattttaatttgggaaaatcaagggatcacaatgagaactctgcacttgaagttggatttggctcaaacaatggaggctttatgattaagagttataatgacatgctcaaggagatttcttctgggacaacgaaggatctggaagatatttatgactcaagatattttgcagctgccgaagatatcatgtcgactaatgtctgtcagctgtcatcgaaaaatccaagcaccaggagcaacaaacggaaggcgagctcatgcgcttcgacgatcgatggaccgacaacttccacaagccatgtacctgctgcttcaggggcattggggggctcttcgaacgacagaggatcggctctccccaaggagatttccttctgtgatcagaccgtcgtccctaccggagccgatcagaggccatgtaccatcaagatcgacagcgagacgctcgcgcagaacagggacagcgcgatgcagcggtacagggagaagaagaagaaccgcaggtatgagaagcacatcaggtacgagtcgaggaagctgagagcggacacgaggaagagggtgaaaggccggtttgtgaagtcgaacggagcacctgatgatgtcagcaatggcgggtga

SEQ ID NO: 358 - protein, 488 aa, Oryza sativa
  ref <308>: DATABASE ACCESSION NUMBER: LOC_Os08g42440
MKDGGGGGGRGQQQQWPCDYCGEAAAALHCRADAARLCVACDRHVHAANALSRKHVRAPLCAACAARPAAARVASASAPAFLCADCDTGCGGDDGAALRVPVEGFSGCPAAAELAASWGLDLPGGCGGEEEEADDAFFSALDYSMLAVDPVLRDLYVPCDPPEVVVAGGGRRLKGEALGHQLAEMARREAETAHPHTQPHSDLSPRTPRRTSAAASGRLQEKQAPPPLPHAAATAAPLPYTSLLMMAPANCTELMENNRVGDEDENVLWESTAPSVPPTQIWDFNLGKSRDHNENSALEVGFGSNNGGFMIKSYNDMLKEISSGTTKDLEDIYDSRYFAAAEDIMSTNVCQLSSKNPSTRSNKRKASSCASTIDGPTTSTSHVPAASGALGGSSNDRGSALPKEISFCDQTVVPTGADQRPCTIKIDSETLAQNRDSAMQRYREKKKNRRYEKHIRYESRKLRADTRKRVKGRFVKSNGAPDDVSNGG

SEQ ID NO: 359 - DNA, 1164 bp, Oryza sativa
  ref <308>: DATABASE ACCESSION NUMBER: LOC_Os03g53050
atggaggggatggaggaagcaaacagggaggcagtgcagagctgtcacagggtgctcaccctcctctccagcccccatagccagcttgtccctaacaaggatctcgcggcggctacgggagaggctgttgcaaagttctgctccgtggcatccaggctgaacaatggcaatggcctccagggccatgcccgggttagaaagatcaagaagcccttgcctatctttgatagcaacctctttttggagagccctgcactggctgtggcgatggcagccaagacacctaactcgagtccgatcactagcctccagctgtttccgaggtaccatcagatggagggctcttcttcaaaggatcctgttaggatccctgcccaattccccaaaaggttgcttctagataaccctgcggttgattcggatgggccatcacgggggccaccgctccagctcatccagccggtgtctgttgcgcccccagctggaacgcctcacccggcattgccttcggcgcatcttcatttcatccagcagcatcagagctaccagaggtttcagctcatgcagcagatgaagatgcagagtgagatgataaagaggagtggccttggtgaacagggtggtagcaatggtggtggtaagggtgttaatctcaagtttgacagttctaattgcacggcatcatcctcccgttcattcttgtcgtctctgagtatggaggggagcattgcgagtttggacggtagccgctccagtcgtccattccagctagttagtgggtcacagacgtcaagcactccagagttaggcctcatgcagaggaggaggtgcactggtagggaggatggtagtggacgatgcacaactgggagccgatgtcactgtgcgaagaaaaggaagctgaggataaggaggtctatcaaagtccctgcaatcagtaataaggttgctgacattccagctgatgagttctcatggaggaagtatggacagaagccaataaaaggatccccacatcctaggggttactataagtgtagcagtgtaagaggatgcccagccaggaagcatgttgagaggtgcgtcgacgacccctcgatgttgattgttacctatgaaggtgatcacaatcacaaccgggtcctagctgcccagccagcctga

SEQ ID NO: 360 - protein, 387 aa, Oryza sativa
  ref <308>: DATABASE ACCESSION NUMBER: LOC_Os03g53050
MEGMEEANREAVQSCHRVLTLLSSPHSQLVPNKDLAAATGEAVAKFCSVASRLNNGNGLQGHARVRKIKKPLPIFDSNLFLESPALAVAMAAKTPNSSPITSLQLFPRYHQMEGSSSKDPVRIPAQFPKRLLLDNPAVDSDGPSRGPPLQLIQPVSVAPPAGTPHPALPSAHLHFIQQHQSYQRFQLMQQMKMQSEMIKRSGLGEQGGSNGGGKGVNLKFDSSNCTASSSRSFLSSLSMEGSIASLDGSRSSRPFQLVSGSQTSSTPELGLMQRRRCTGREDGSGRCTTGSRCHCAKKRKLRIRRSIKVPAISNKVADIPADEFSWRKYGQKPIKGSPHPRGYYKCSSVRGCPARKHVERCVDDPSMLIVTYEGDHNHNRVLAAQPA

SEQ ID NO: 361 - DNA, 1368 bp, Oryza sativa
  ref <308>: DATABASE ACCESSION NUMBER: LOC_Os06g24070
atgcttgccgtgtcgccggcgatgtgccccgacattgaggaccgcgccgcggtggccggcgatgctggcatggaggtcgtcgggatgtcgtcggacgacatggatcagttcgacttctccgtcgatgacatagacttcggggacttcttcctgaggctggaggacggtgatgtgctcccggacctcgaggtcgacccggccgagatcttcaccgacttcgaggcaatcgcgacgagtggaggcgaaggtgtgcaggaccaggaggtgcccaccgtcgagctcttggcgcctgcggacgacgtcggtgtgctggatccgtgcggcgatgtcgtcgtcggggaggagaacgcggcgtttgccggggctggagaggagaagggagggtgtaaccaggacgatgatgcgggggaagcgaatgtcgacgatggagccgcggcggttgaggccaagtcttcgtcgccgtcatcgacgacgtcgtcgtcgcaggaggctgagagccggcacaagtcatccagcaagagctcccatgggaagaagaaagcgaaggtggactggacgcctgagcttcaccggaggttcgtgcaggcggtggagcagctcggcatcgacaaggccgtgccgtcgaggatacttgagatcatggggatcgactctctcacccggcacaacatagccagccatcttcagaagtaccggtcacacagaaaacacatgattgcgagagaggcggaggcagcgagttggacccaacggcggcagatttacgccgccggtggaggtgctgttgcgaagaggccggagtccaacgcgtggaccgtgccaaccattggcttccctcctcctccgccaccaccaccatcaccggctccgattcaacattttgctcgcccgttgcatgtttggggccacccgacgatggacccgtcccgagttccagtgtggccaccgcggcacctcgttccccgtggcccggcgccaccatgggttccaccgccgccgccgtcggaccctgctttctggcaccacccttacatgagggggccagcacatgtgccaactcaagggacaccttgcatggcgatgcccatgccagctgcgagatttcctgctccaccggtgccaggagttgtcccgtgtccaatgtataggccattgactccaccagcactggcgagcaagaatcagcaggacgcacagcttcaactccaggttcaaccatcaagcgagagcatcgacgcagctatcggtgatgttttatcgaaaccgtggttgcctttgcctcttggactgaagccaccttcagtggacagtgtgatgggcgagctgcagaggcaaggcgtagcaaacgttcctccagcgtgtggatga

SEQ ID NO: 362 - protein, 455 aa, Oryza sativa
  ref <308>: DATABASE ACCESSION NUMBER: LOC_Os06g24070
MLAVSPAMCPDIEDRAAVAGDAGMEVVGMSSDDMDQFDFSVDDIDFGDFFLRLEDGDVLPDLEVDPAEIFTDFEAIATSGGEGVQDQEVPTVELLAPADDVGVLDPCGDVVVGEENAAFAGAGEEKGGCNQDDDAGEANVDDGAAAVEAKSSSPSSTTSSSQEAESRHKSSSKSSHGKKKAKVDWTPELHRRFVQAVEQLGIDKAVPSRILEIMGIDSLTRHNIASHLQKYRSHRKHMIAREAEAASWTQRRQIYAAGGGAVAKRPESNAWTVPTIGFPPPPPPPPSPAPIQHFARPLHVWGHPTMDPSRVPVWPPRHLVPRGPAPPWVPPPPPSDPAFWHHPYMRGPAHVPTQGTPCMAMPMPAARFPAPPVPGVVPCPMYRPLTPPALASKNQQDAQLQLQVQPSSESIDAAIGDVLSKPWLPLPLGLKPPSVDSVMGELQRQGVANVPPACG

SEQ ID NO: 363 - DNA, 2304 bp, Oryza sativa
  ref <308>: DATABASE ACCESSION NUMBER: LOC_Os03g17570
atgggtagcgcctgcgaagctggtacggacgagccttcccgagacgatgttaaggggacagggaatggcatcctggagaatggtcatagtcacaagccagaggaggaggaatggaggaatggcatgggagaggacttacccaatgggcacagtacaccaccagagccccagcaaacagatgaacagaaggagcaccaagtgcagattgtccggtgggagaggttcctccctgtgaagacactgagggtcttgctggtggagaatgatgactctacccgtcaggtggtcagcgcactgcttcgtaagtgttgttatgaagttatccctgctgaaaatgggctacatgcatggcaatgtcttgaagatctgcaaaaccacattgaccttgtattgaccgaggtcgtaatgccacgtctgtctggcattggtctgcttagtaagatcacaagccacaaaatttgcaaggatattcccgtgattatgatgtcttcgaatgactcaatgggtacagtctttaagtgtttgtcaaaaggagcagttgactttctagtgaagcctatacgtaagaatgaacttaagaacctttggcagcatgtttggagacgatgccacagttccagtggcagtggaagcgaaagtggcatccgaacacaaaagtgtaccaaaccaaaggttgatgatgaatatgagaataacagcggtagcaataatgacaacgaggatgatgatgacaatgatgaagatgatgacgacttaagtgttggacacaacgctagggatggcagtgataatggcagtggcactcaaagttcatggacaaagcgtgcagtggagattgacagcccacaacaaatgtctcctgatcaaccatccgatctaccagatagtacttgtgcgcaagtaattcaccccacatcagagatatgcagcaacaggtggttaccgactgcaaataaaaggagcggaaagaaacataaagaaaataacgatgactccatggggaagtacttagaaataggagctcctagaaattctagtatggagtaccaatcttctccaagagagatgtccgttaatccaacagaaaaacagcatgaaactctcatgccccaaagtaaaacaacaagagaaacagatagtaggaacacacagaatgaaccaactactcaaactgttgatttaattagttcaatagccagaagcacagatgacaaacaagtagttagaatcaataatgctcctgattgctcctccaaggttccagatggaaatgataaaaatcgtgattctctcattgatatgacatctgaagagttgggtttgaagagattgaaaacaactggatctgcaactgaaatccatgatgaacgaaatattctgaaaagatcagatctctcagctttcaccaggtaccatacaactgtggcttctaatcaaggtggagctggatttgggggaagctgttcacctcaagataacagttcagaggctctgaaaacagactccaactgcaaggtgaagtcaaattcagatgctgctgaaataaagcaaggctccaatggtagtagcaacaacaatgacatgggctccagtactaagaatgccatcacaaaaccttcttcaaacaggggaaaagtgatatcaccatcagctgtcaaagctacccaacatacatcagcattccatcctgtgcagcgtcaaacgtcacctgctaatgttgtagggaaagacaaagttgatgaaggaattgctaatggagttaatgtgggccaccctgtagatgtacaaaatagctttatgcagcaccatcatcatgttcattactacgtccatgttatgacacagcagcagcagcagccatccattgagcgaggatcatcagatgctcagtgtggttcatccaatgtatttgatcctcccattgaaggtcatgcggcaaactatagtgtgaacgggagcttttcaggtggccataatggaaacaatgggcaaagaggacctagtactgctcccaatgttgggaggccaaacatggagactgttaatggtatcgtggatgaaaatggggctggaggtggcaatggaagtgggagcggtagtggtaatgacttgtatcagaatggggtctgttaccgagaagctgcattgaacaaattcagacagaaacggaaagtgaggaactttggaaaaaaggtgcgctatcagagcagaaagaggttggctgagcagcgccctcggatccgcgggcaattcgtgcgacaatctggacaggaagatcaggcaggccaagacgaagacagataa

SEQ ID NO: 364 - protein, 767 aa, Oryza sativa
  ref <308>: DATABASE ACCESSION NUMBER: LOC_Os03g17570
MGSACEAGTDEPSRDDVKGTGNGILENGHSHKPEEEEWRNGMGEDLPNGHSTPPEPQQTDEQKEHQVQIVRWERFLPVKTLRVLLVENDDSTRQVVSALLRKCCYEVIPAENGLHAWQCLEDLQNHIDLVLTEVVMPRLSGIGLLSKITSHKICKDIPVIMMSSNDSMGTVFKCLSKGAVDFLVKPIRKNELKNLWQHVWRRCHSSSGSGSESGIRTQKCTKPKVDDEYENNSGSNNDNEDDDDNDEDDDDLSVGHNARDGSDNGSGTQSSWTKRAVEIDSPQQMSPDQPSDLPDSTCAQVIHPTSEICSNRWLPTANKRSGKKHKENNDDSMGKYLEIGAPRNSSMEYQSSPREMSVNPTEKQHETLMPQSKTTRETDSRNTQNEPTTQTVDLISSIARSTDDKQVVRINNAPDCSSKVPDGNDKNRDSLIDMTSEELGLKRLKTTGSATEIHDERNILKRSDLSAFTRYHTTVASNQGGAGFGGSCSPQDNSSEALKTDSNCKVKSNSDAAEIKQGSNGSSNNNDMGSSTKNAITKPSSNRGKVISPSAVKATQHTSAFHPVQRQTSPANVVGKDKVDEGIANGVNVGHPVDVQNSFMQHHHHVHYYVHVMTQQQQQPSIERGSSDAQCGSSNVFDPPIEGHAANYSVNGSFSGGHNGNNGQRGPSTAPNVGRPNMETVNGIVDENGAGGGNGSGSGSGNDLYQNGVCYREAALNKFRQKRKVRNFGKKVRYQSRKRLAEQRPRIRGQFVRQSGQEDQAGQDEDR

SEQ ID NO: 365 - DNA, 597 bp, Oryza sativa
  ref <308>: DATABASE ACCESSION NUMBER: LOC_Os01g05080
atggccatccccaccatcctgggcagtctgaagctcacgccatccccaccctccgccacgccggtgcgctcctccgcctcctcctccctgcatttccacctcgccaacgccggcgccgccgcgctcgtcgcggcctcgctcctcgtcgccgacccggccctggcattcaagggaggaggcccgtacgggcagcaggtgacacgggggcaggacctcaccggcaaggacttcagtggccagacgctcatcaggcaggacttcaagacgtctatactgaggcaggcgaacttcaaaggcgcgaagctgctcggcgcgagcttctttgatgcagatctgacaggtgctgatctctctgatgctgatcttagaggtgcagatttctcactggcaaatgtatcgaaggtaaatctgacaaatgccaacttggaaggggcacttgccacaggaaacacgacgttcaaaggttccaacatatatggagcagattttacagatgttccactgcgagacgatcagcgtgaatacctctgcaaaattgctgatggggtcaatacaaccactggaaacgccacgaaggagactcttttctgcaaatga

SEQ ID NO: 366 - protein, 198 aa, Oryza sativa
  ref <308>: DATABASE ACCESSION NUMBER: LOC_Os01g05080
MAIPTILGSLKLTPSPPSATPVRSSASSSLHFHLANAGAAALVAASLLVADPALAFKGGGPYGQQVTRGQDLTGKDFSGQTLIRQDFKTSILRQANFKGAKLLGASFFDADLTGADLSDADLRGADFSLANVSKVNLTNANLEGALATGNTTFKGSNIYGADFTDVPLRDDQREYLCKIADGVNTTTGNATKETLFCK

SEQ ID NO: 367 - DNA, 1389 bp, Oryza sativa
  ref <308>: DATABASE ACCESSION NUMBER: LOC_Os04g59130
atgtctttccgcagcatagttcgtgatttcagggacagtttcgggactctatccaagcggagtttcgaggtgaaaatttcaggcttttcgggccgtcacagagggaaatccattggaccatcaagcgagctggatgacacgcccgtggtagctcagcaaagcaagtgggctggtcttcctcctgaattacttcgcgacgtgatgaaaaggctggaggaagatgatagcaattggccctcccgcaaggatgttgttgcctgcgcttcagtttgtacgacttggagagacatgtgcaaagatattgtcaggaaccctgaattttgtggaaagcttacatttccagtgtctcttaagcagcctggacctcgagatggagtaatccaatgtttcataaaaagggacaaatcaaaactaacttatcatctctacctgtgccttagctctgctgtgcttgatgagactggaaagttcctactatcagctaaaaggagccggcgaacgacacacactgactacatcatttctatggactccaaaaatatctcccgatcaagtagtggctatattgggaagttgaggtcaaatttcctcggcaccaaattcatcatctatgacacgcagcctccatacaatgctcggacactttgctcacaagaacggacgagccgtcggttctcctctaggaaagtttccccaaaagttccaacgggttgttatcccatcgtgcaggtgaattatgagctaaatgtgcttggaacccggggaccaagacggatgcaatgcgctatgcattccatcccagcatcagcagtagagcctggtggcattgtgcctggccaacctaaagagctcctcccaaggttatttgaggagtccttccgcagtatggcaacttccttctccaagtactccatcacagatcattcgacagacttcagtagttctcgcttctctgagtttgggggaggggctctgcaagggcaagagcaagagcaagatggcgatgatgtgaacaaggagaggcctttggttctccggaacaaagcaccaaggtggcatgaacagctgcaatgctggtgcctcaacttccgtggccgtgtgacggtggcttcagtgaagaacttccagctgatagctgctgcacctcagccatcttctggagccgcctctgaaccttcacaggcagggcaggctgcacaacagcaaacccaaccttctcagccatcgagttcgtcgtcgtcgtcatcatccaaccatgatacggtgatcctgcaattcggcaaagttgcaaaggacatgttcaccatggattaccggtacccattgtcggccttccaggcttttgctatctgtttgaccagctttgacaccaagctggcatgtgaataa

SEQ ID NO: 368 - protein, 462 aa, Oryza sativa
  ref <308>: DATABASE ACCESSION NUMBER: LOC_Os04g59130
MSFRSIVRDFRDSFGTLSKRSFEVKISGFSGRHRGKSIGPSSELDDTPVVAQQSKWAGLPPELLRDVMKRLEEDDSNWPSRKDVVACASVCTTWRDMCKDIVRNPEFCGKLTFPVSLKQPGPRDGVIQCFIKRDKSKLTYHLYLCLSSAVLDETGKFLLSAKRSRRTTHTDYIISMDSKNISRSSSGYIGKLRSNFLGTKFIIYDTQPPYNARTLCSQERTSRRFSSRKVSPKVPTGCYPIVQVNYELNVLGTRGPRRMQCAMHSIPASAVEPGGIVPGQPKELLPRLFEESFRSMATSFSKYSITDHSTDFSSSRFSEFGGGALQGQEQEQDGDDVNKERPLVLRNKAPRWHEQLQCWCLNFRGRVTVASVKNFQLIAAAPQPSSGAASEPSQAGQAAQQQTQPSQPSSSSSSSSSNHDTVILQFGKVAKDMFTMDYRYPLSAFQAFAICLTSFDTKLACE

SEQ ID NO: 369 - DNA, 3351 bp, Oryza sativa
  ref <308>: DATABASE ACCESSION NUMBER: LOC_Os08g40900
atggcgagctccggcggagggggtggtggtggggaggagggggagggcaggggggcgaccaaggtgaaccaggagctgtggtacgcgtgcgcggggccgctcgtctcgctgccgccgcaggggagcctcatcgtctacttcccccagggtcacagcgagcaggttgcagcatctatgcgaaaggacgcagatgcgcaaattccaagctatccaaatcttccatcaaagctgatatgcatcctccacagtgtcaccatgcttgctgatcctgacacagatgaggtttatgctcgaatgactctccagccagttagcaatgtgacccagtgtgacaaggagacattgctagcatcagagcttgcgctgaagcaaaccaggccacaaacagaattcttttgcaaaacactgaccgccagtgatacaagcactcatggaggtttctctgtgccacgccgtgccgctgagaggatttttcctcgtcttgacttctccatgcagcctcctgcccaggaactgcaggcccgggatttgcatgataatgtttggacatttcgtcatatataccggggtcagcctaaaaggcatttactgactacgggctggagcctatttgtcagtggaaagagattacttgctggtgattcagtcttgtttattagggatgcaaaacagcagctcctcttggggatcagacgagcaaataggcaacctacgaacctctcatcatctgtcttatctagtgatagtatgcatattggaattcttgctgcagcagcccatgctgcagcgaataacagccaatttacaatatattataacccaagggccagtacttccgaatttgtgattccttttgccaaataccagaaggcagtgtatggtaaccaattatctcttggcatgcggttcagaatgatgtttgaaactgaagagtcaggaacaagaaggtacatgggtacaataactggtataagtgatctggatccagtaaggtggaaaacatctcattggcgcaatattcaggttgcatgggatgaagcggcaccaactgagagacgcaccagggtttccctctgggagatagagcctatcattgctccattcttcatctacccctcaccattattcaccgcaaaacgtccaaggctacctgggatgacagatgacgagactgaaatggacggtcttctcaagagggccatgccatgggttggtgaggagatttgcaagaaagatctgaatattcagaacagtgtagtgcctggtctaaatctagctcagtggatgaacatgcagcacagctcctcgcttcctggcacggttgtgcaaccagagttactaaactcattaagtggaaaacctgtacaaaatttggctgcagctgatttatcaaggcaaatcagttttcacccgcagttcttgcaacaaaacaacatccagttcaacactgcgttggtacctcaacaaaaccaacagacagaacaattagcgaaagttatccctacaccaaaccaattgggaagtgttataataccgcagaaggtggttcaggattgcaactctgaacaaaggcagcatgtggttactcaaccagtgcaaggcagccagccaaacataaacattccacagcctcagcttgttgttcaggctcagcttcagcaaccgcaagtcattctccaggcgcaactgcagcaacctcaagttgttgtccaggcccaactccagcaaacgcaaccttcggtccaaagtcacactgtcttacaaggaggtcttcaacaaatccagcttctccagcagcaacagccacatgtgcagcaccagcagataccgcaacagttacatcatcagcagcagcaaacacaacagttgcaacctgtccagcaggttcagcagtcagtacaggaacatcagcaaataaagatacaacctgttcatgtttccatggatgcaagtatgaatacgcaggtggcagatcatcaaatgaaactacaactactcaaggctttacagccacagcagcctctgatctcagagcagcagaagatgcttttggatttgcagcagcaagtgataaattcacagtcagctcctcagcagtgtgtacaggtaacaaaccaagctattagtttacataacagtaacactattcaatacccgacacagcaaaaggttcagtctcaccaagttcaagacttaactgggaatgtcattcctaattcaaaatcagacatcgctacttccatgggtgctagttctttgcatgtagctggtggacgccaattattgaagacagatgatgttccgtctacttcaacatcaccatccactaacagcaatcctgttcttctgcaatccatcccaagtagctccaagaaccaaagtttaactacagcaggaaagacatctcaatcatctgttgtgttgggtcctacgatcgaacaggacacaaagccatatcaaaatgtaaagcaaacagttatgattcccaagacgacagaacaaaggccagctactggacaagactgcataaataacaatcctcaaatggattacttggacacatcctcttcagctacttcggtttgcctttcccaggctgatggatcattgcaacaaaactttccaccttcatccttccaccagcatcacttgctaaaagacacagttccagatagcgagtttgaggttacagatccaagaaataaccttctatttggggtgaatattgatggtcaactgggtttaccacttaatgcagacctgcttgcgaatgacattggaaccgataaatacatggatcagttgccaggaaatggcatttctaacttcatttcatcaaaggattctcaacaagagttatcatcttcaatgatttcacattcatttggagttgctgatatggcattcaattctatagattctgcaatcaatgataccccattcttaaatagaaattcccggtctgcagcaggtcctgcacatcaacggatgagaacctacaccaaggtacacaagcgtggtgcggtgggaagatcaattgacatcaatcgatattctggatatgatgagctgaaacatgacgttgctcggatgtttggtattgaggggcagcttggtgatcaaaatagagttggctggaagctagtatatgaagatcacgagaaggatgttctactagttggtgatgatccatgggaggactttgtgaaatgtgtacgatgtatcaggattctttctccacaggaagaaatgcagatgagattagtcggcgactttggagacagctttctacccaaccaagcttgcagcagctctgatgggggtcatccctggaggataaccggcgactag

SEQ ID NO: 370 - protein, 1116 aa, Oryza sativa
  ref <308>: DATABASE ACCESSION NUMBER: LOC_Os08g40900
MASSGGGGGGGEEGEGRGATKVNQELWYACAGPLVSLPPQGSLIVYFPQGHSEQVAASMRKDADAQIPSYPNLPSKLICILHSVTMLADPDTDEVYARMTLQPVSNVTQCDKETLLASELALKQTRPQTEFFCKTLTASDTSTHGGFSVPRRAAERIFPRLDFSMQPPAQELQARDLHDNVWTFRHIYRGQPKRHLLTTGWSLFVSGKRLLAGDSVLFIRDAKQQLLLGIRRANRQPTNLSSSVLSSDSMHIGILAAAAHAAANNSQFTIYYNPRASTSEFVIPFAKYQKAVYGNQLSLGMRFRMMFETEESGTRRYMGTITGISDLDPVRWKTSHWRNIQVAWDEAAPTERRTRVSLWEIEPIIAPFFIYPSPLFTAKRPRLPGMTDDETEMDGLLKRAMPWVGEEICKKDLNIQNSVVPGLNLAQWMNMQHSSSLPGTVVQPELLNSLSGKPVQNLAAADLSRQISFHPQFLQQNNIQFNTALVPQQNQQTEQLAKVIPTPNQLGSVIIPQKVVQDCNSEQRQHVVTQPVQGSQPNINIPQPQLVVQAQLQQPQVILQAQLQQPQVVVQAQLQQTQPSVQSHTVLQGGLQQIQLLQQQQPHVQHQQIPQQLHHQQQQTQQLQPVQQVQQSVQEHQQIKIQPVHVSMDASMNTQVADHQMKLQLLKALQPQQPLISEQQKMLLDLQQQVINSQSAPQQCVQVTNQAISLHNSNTIQYPTQQKVQSHQVQDLTGNVIPNSKSDIATSMGASSLHVAGGRQLLKTDDVPSTSTSPSTNSNPVLLQSIPSSSKNQSLTTAGKTSQSSVVLGPTIEQDTKPYQNVKQTVMIPKTTEQRPATGQDCINNNPQMDYLDTSSSATSVCLSQADGSLQQNFPPSSFHQHHLLKDTVPDSEFEVTDPRNNLLFGVNIDGQLGLPLNADLLANDIGTDKYMDQLPGNGISNFISSKDSQQELSSSMISHSFGVADMAFNSIDSAINDTPFLNRNSRSAAGPAHQRMRTYTKVHKRGAVGRSIDINRYSGYDELKHDVARMFGIEGQLGDQNRVGWKLVYEDHEKDVLLVGDDPWEDFVKCVRCIRILSPQEEMQMRLVGDFGDSFLPNQACSSSDGGHPWRITGD

SEQ ID NO: 371 - DNA, 1920 bp, Oryza sativa
  ref <308>: DATABASE ACCESSION NUMBER: LOC_Os06g19980
atgggcggagagggagcggaacggcgcagcaagaagaaggagaaggggaagcgccaggaggagaaggctgaatcgggcagtcgcggcgatggagaggcagtgaagctggatttggctacagatttcccaagtaatagcatggggaaggttgcaatggacgttgaggaggcgaaagaagtgcacaggaggaagaagaggaaggagaaggagaaggaccacggaaaggagaagaagaacaaggtcattgccgataacatcgaggaggcctgtgccgaggcggagcaggctgaagcttcaggactgaaggtggagcagcactgctcggagcatgttcagggtgatatgagcaaatgcggctcggaggaagacaagagtattaagaaagataataagttgatgaagaagaagaagaagaaagagagaaaagtggagatggctgaagaggggcagatacttgctggttctactgatgaaaatgcaggcttgttgcatgcggagatgggcaggggtgaaaaggaacagggtaagaagtccaagaagagcaaacggaagcatgaggatggtgagcctgtggcagatggatctgccggtgatgaaatcatgaccaacagagataagaagaggagaagaaaggagcattctgttgagctgaaagagggtgatcaagttaacatatctaagaaggcagtgaagataaagggaaacaagaagagaaaaaatgaaagcgataagtttaatcctgacttaagcactgatgcactcactggagaagataaggttggtggagatggcaaaaatgataagagaaaaaagaagaacgatacatcgactagaaggaatgaggttggtagggatgataagaatgataagaaaaaaaagaagagcaaggaaaggaacggtggaagaaaaggcgaaaaagaaaaagcagcccagtcaaaggacaaggttaggcgggtgagcttttctgatgctgtggaggtgtttagcatcaacgacggtgaagatgaagataatggcaagagtgctgaatccgaagttgtgcatgggaaacgttttactccagaagaaaacgcgacccttatggaggccatcatgagctatatagagatgaagcaattgggagagaatgggctagagatgattcgagcttgtagtaaacatccagagcttaagggttgttgggcggagattggaaaatcattacctcacaggccattgacagccatatacaagagagcacggattttactctataggagtgatgagcgtaaatggactccggaggagtatgagaagattcgccggcatgttgaaaagaacggcacttcttggatatcattagcacaggaacttggaaagagtgagatccatttaaaggacacttggagaagaatcaaacctaaaaacttgaaatcagttgcgagattttgcatttccattaaatggaaagacagtttgcagagccagtggacacaggacgagtaccaaaacttgtttgatttggtgaacttggacttgcgagtgaaagctcatcaagagtatgatgctggtaatcgtaagttaagagacaacattgcatgggaggctattagtgataaattgacaacccgaaatcacaagaattgctgccttaagtggtactaccagttagcatcaccactggttcagaaaggcatctgggcagacactgatgattatcgattggtggaagcgcttcaaaatgttgatgctgtttgtgttgaagatattgactgggataaccttcttgatcacaggtctggagaggtttgccgtcaacgatggaacgagatggtccgctatttaggtggccacaaggagaagcccttcattgaacaagtggaagtgttgtcgaagcgctactgcccagaaatggttgactatagggaaggggaagcgtag

SEQ ID NO: 372 - protein, 639 aa, Oryza sativa
  ref <308>: DATABASE ACCESSION NUMBER: LOC_Os06g19980
MGGEGAERRSKKKEKGKRQEEKAESGSRGDGEAVKLDLATDFPSNSMGKVAMDVEEAKEVHRRKKRKEKEKDHGKEKKNKVIADNIEEACAEAEQAEASGLKVEQHCSEHVQGDMSKCGSEEDKSIKKDNKLMKKKKKKERKVEMAEEGQILAGSTDENAGLLHAEMGRGEKEQGKKSKKSKRKHEDGEPVADGSAGDEIMTNRDKKRRRKEHSVELKEGDQVNISKKAVKIKGNKKRKNESDKFNPDLSTDALTGEDKVGGDGKNDKRKKKNDTSTRRNEVGRDDKNDKKKKKSKERNGGRKGEKEKAAQSKDKVRRVSFSDAVEVFSINDGEDEDNGKSAESEVVHGKRFTPEENATLMEAIMSYIEMKQLGENGLEMIRACSKHPELKGCWAEIGKSLPHRPLTAIYKRARILLYRSDERKWTPEEYEKIRRHVEKNGTSWISLAQELGKSEIHLKDTWRRIKPKNLKSVARFCISIKWKDSLQSQWTQDEYQNLFDLVNLDLRVKAHQEYDAGNRKLRDNIAWEAISDKLTTRNHKNCCLKWYYQLASPLVQKGIWADTDDYRLVEALQNVDAVCVEDIDWDNLLDHRSGEVCRQRWNEMVRYLGGHKEKPFIEQVEVLSKRYCPEMVDYREGEA

SEQ ID NO: 373 - DNA, 843 bp, Oryza sativa
  ref <308>: DATABASE ACCESSION NUMBER: LOC_Os07g27460
atggacgaaccatcatcatcatcatcatcatcatatccatcttcctctggtgggaaaaagaagcgaccacgctctcctggtcacagcgatgagcgtccagtgcacacaacccaaatatacacaagcagccttgaggacacccttacgttcagtgataccatgattgctcttcaactgatgcgcacacaattcccaaagctagagaaggttgtgacagaaccattcattttgcagtcacagttgtatagtagtgtgaaggacaggacacaagttgatagagaccttgagtccttgaagaaagacaaagtattgcgtgtattcaaactcaatactgggcaggatgatcatgcaatcatgttcatggatgattatctgaaacagatggcgttggcagtcaagaggtcaaggggtaaggaccaagatggtactgaagtttttgggtggtttgagagatatgttattcatttgaagcttgaagttagcattgatcagcgcgatctgttttctctgttatcacttggaggtgatgtaactgacaaacatatcacattactgatgaatgctggtctcttaactcgccaattaattgatccaaacatgtactggttttctataccaagtattggtcccgtcttgaaaggcctaacccagggaaggaaggaaattctttcattattgaaccgcaagaagtacaaggagatgctactctcttcactggagaagacaagattacggttttcacctcttgatgtgcgctttcacattcgcgacttaattggatctgggcacataaaaacagttcaaacacccactggtttacttgttcgcatatcaaaagattga

SEQ ID NO: 374 - protein, 280 aa, Oryza sativa
  ref <308>: DATABASE ACCESSION NUMBER: LOC_Os07g27460
MDEPSSSSSSSYPSSSGGKKKRPRSPGHSDERPVHTTQIYTSSLEDTLTFSDTMIALQLMRTQFPKLEKVVTEPFILQSQLYSSVKDRTQVDRDLESLKKDKVLRVFKLNTGQDDHAIMFMDDYLKQMALAVKRSRGKDQDGTEVFGWFERYVIHLKLEVSIDQRDLFSLLSLGGDVTDKHITLLMNAGLLTRQLIDPNMYWFSIPSIGPVLKGLTQGRKEILSLLNRKKYKEMLLSSLEKTRLRFSPLDVRFHIRDLIGSGHIKTVQTPTGLLVRISKD

SEQ ID NO: 375 - DNA, 669 bp, Oryza sativa
  ref <308>: DATABASE ACCESSION NUMBER: LOC_Os08g02070
atggcgcgaggcaaggtgcagctccgtcgcatcgagaacccggttcaccgtcaggtcaccttctgcaagcgccgtgccggcctgctgaagaaggccagggagctctccatcctctgcgaggccgacatcggcatcatcatcttctccgcccacggcaagctctacgacctcgccaccaccggaaccatggaggagctgatcgagaggtacaagagtgctagtggcgaacaggccaacgcctgcggcgaccagagaatggacccaaaacaggaggcaatggtgctcaaacaagaaatcaatctactgcagaagggcctgaggtacatctatgggaacagggcaaatgaacacatgactgttgaagagctgaatgccctagagaggtacttagagatatggatgtacaacattcgctccgcaaagatgcagataatgatccaagagatccaagcactaaagagcaaggaaggcatgttgaaagctgctaacgaaattctccaagaaaagatagtagaacagaatggtctgatcgacgtaggcatgatggtagcagatcaacagaatgggcattttagtacagtcccactgttagaagagatcactaacccactgactatactgagtggctattctacttgtaggggctcggagatgggctattccttctaa

SEQ ID NO: 376 - protein, 222 aa, Oryza sativa
  ref <308>: DATABASE ACCESSION NUMBER: LOC_Os08g02070
MARGKVQLRRIENPVHRQVTFCKRRAGLLKKARELSILCEADIGIIIFSAHGKLYDLATTGTMEELIERYKSASGEQANACGDQRMDPKQEAMVLKQEINLLQKGLRYIYGNRANEHMTVEELNALERYLEIWMYNIRSAKMQIMIQEIQALKSKEGMLKAANEILQEKIVEQNGLIDVGMMVADQQNGHFSTVPLLEEITNPLTILSGYSTCRGSEMGYSF

SEQ ID NO: 377 - DNA, 1176 bp, Oryza sativa
  ref <308>: DATABASE ACCESSION NUMBER: LOC_Os05g29030
atgcggcacatctcgtcgctgctgcaggggctggcgcgctcgctgtcggtggggaaggagaggaagggcggcgacggcgacgacgggaaggcggcggcggcgacggcgacggcggtgctgaggacatcggggacgctgtggggcgagggctctgagacgttcgccgccgtctgctcccgccgcggcgagaagggcatcaaccaggactgctccatcgtctgcgagggattcgggtgcgaggaggggagcgtgttgtgcggcatcttcgacgggcacgggcagtggggccactacgtggcgaaggcggtgagggagtcgctgccgccggcgctgctccggcggtggcgggaggccgtgacgctggcggcgctcatcgacggcggcgagaagcggctctgcgagtgccggcccgacctgtggcgccagtcctacctggccgcctgcgccgccgtcgacgccgagctccgcgccagccgccgcctcgacgccgtccacagcggctgcaccgcgctgtccctcgtcaagcacggcgacctcctcgtcgtcgccaacgtcggcgactcgcgcgccgtcctggccaccgcctcccccgacgacggtggcggcgcccgcctcgccgccgtgcagctcaccgtcgacttcaagcccaacctgccccaggagagggagaggatcatggagtgcaacgggagggtgcagtgcctcgccgacgagcccggggtgcaccgggtgtggcggccggacagggagggcccaggcctcgccatgtcgcgcgccttcggcgactactgcgtcaaggattacggcgtcatctcggcgccggaggtgacgcaccgccggatcaccgcccaggaccacttcgtcatcctcgccaccgacggggacaaacatctcaacttgttcgtcttcgtctgcgcggcaggtgtgggacgtggtgtcgaacgaggaggcggtgcagatcgtggcgtcggcgccggagagggagaaggcggcgaagcggctcgtcgagttcgccgtccgggcatggaggcgcaagcgccggggcatcgccgtcgacgactgctcggcgatctgcctcttcttccactcgccgccgtcctaaacaacacacacgctgacacgcacgcagccaacaaaaaccgcacacgccgacgacaatgtcgccgtcgtcgttga

SEQ ID NO: 378 - protein, 391 aa, Oryza sativa
  ref <308>: DATABASE ACCESSION NUMBER: LOC_Os05g29030
MRHISSLLQGLARSLSVGKERKGGDGDDGKAAAATATAVLRTSGTLWGEGSETFAAVCSRRGEKGINQDCSIVCEGFGCEEGSVLCGIFDGHGQWGHYVAKAVRESLPPALLRRWREAVTLAALIDGGEKRLCECRPDLWRQSYLAACAAVDAELRASRRLDAVHSGCTALSLVKHGDLLVVANVGDSRAVLATASPDDGGGARLAAVQLTVDFKPNLPQERERIMECNGRVQCLADEPGVHRVWRPDREGPGLAMSRAFGDYCVKDYGVISAPEVTHRRITAQDHFVILATDGDKHLNLFVFVCAAGVGRGVERGGGADRGVGAGEGEGGEAARRVRRPGMEAQAPGHRRRRLLGDLPLLPLAAVLNNTHADTHAANKNRTRRRQCRRRR

SEQ ID NO: 379 - DNA, 837 bp, Oryza sativa
  ref <308>: DATABASE ACCESSION NUMBER: LOC_Os07g41740
atggacgcgcagtacaacccgcgaacggtggaggaggtcttccgcgacttcaagggccgccgcgccggcctcgtccgcgcgctcaccgcagatgtggaggatttcttccggcaatgcgacccggaaaaggaaaacttgtgcctttatgggtttcccaatgagcattgggaagtaaatttgcccgcagaagaggtgccacctgagctcccagagccagcattgggcattaactttgcacgagatgggatgcaggaaaaagattggctgtccatggttgcagtgcacagtgatgcatggttactttctgttgcattttactttggtgctcggttcggatttgataaaaatgacaggaagcgcctgtttggtatgattaatgatcttcccacgatttttgaagttgttagtgggaagagtaaagccaagccaccgagtgctaataaccacagcaatagtaaatcaaaatccagcaataaaacgaagtcttctgagcctcgggcgaagcagccaaagccgcagccccagcccccagtgaagaacgaaggccgcgaggaggaaggcggcccggacgacgaggaaggcggcggtggcggcggaggaggcggtagggaggaggagcacggggagacgctgtgcggcgcgtgcggggagagctacggcgccgacgagttctggatctgctgcgacatctgcgagaagtggttccacggcaagtgcgtcaagatcaccccggccaaggcggagcacatcaagcagtacaagtgcccctcctgcagcggcggcaacggcggtggcggcggcgtcagcggcaacggcaagcgtgcgcgcccgtcctaa

SEQ ID NO: 380 - protein, 278 aa, Oryza sativa
  ref <308>: DATABASE ACCESSION NUMBER: LOC_Os07g41740
MDAQYNPRTVEEVFRDFKGRRAGLVRALTADVEDFFRQCDPEKENLCLYGFPNEHWEVNLPAEEVPPELPEPALGINFARDGMQEKDWLSMVAVHSDAWLLSVAFYFGARFGFDKNDRKRLFGMINDLPTIFEVVSGKSKAKPPSANNHSNSKSKSSNKTKSSEPRAKQPKPQPQPPVKNEGREEEGGPDDEEGGGGGGGGGREEEHGETLCGACGESYGADEFWICCDICEKWFHGKCVKITPAKAEHIKQYKCPSCSGGNGGGGGVSGNGKRARPS

SEQ ID NO: 381 - DNA, 927 bp, Oryza sativa
  ref <308>: DATABASE ACCESSION NUMBER: LOC_Os05g51690
atgtacgccgccatgtacccggagaccttcggcttctctgcttacccccagcagcagcagccgccgcccgacgccgcctcctgcatctacaccaccgccttgccgctcatcgccgacccgcctgacatcctcggaaacatggcacaaccatcctttctatcagagtatgaccttggaggggaaggggacctgttcaaagctcctgaacccatcattgaagaaccagtgcttagccttgatccagttgcagcagccatttcgatgatgtctggcagtgagaacgtaatggatgaaactatagaggttgcagatatcagcgacattcagaatgactctcttttaagcgaagtattatacgagtgcgagaaggaactcatggagaagtccgcaatcgaagagactatttctgaactgctggacgtcaagattcctatgctgcaagtggaagagttccctagggaaacccaagtacaactaccggccatggagaaggagaagccatcagttcctgaatgttgttcactccagaaaagtgtcagttctgggtgcctcaactcagctgattggatcaatggaccagccaggccaaacttcctggacttccaaggattggactttgagacagcgtttgggttgaggagggcatacagcgaaggagacattcagaatcttggagctagcacccctcgacccgggaactcaggaaacgctcaattagcatcttgcgagaggcttgtaaccatcagtgacctgaaatctgaagaaaggaagcagaagctatctaggtacagaaagaagaaggtgaagagaaactttggcagaaagatcaagtatgcttgcaggaaggctcttgcagacagccagccaagagtgcgagggaggtttgccaagatcgaagaaggcgacttgctcaagccaaggaagtag

SEQ ID NO: 382 - protein, 308 aa, Oryza sativa
  ref <308>: DATABASE ACCESSION NUMBER: LOC_Os05g51690
MYAAMYPETFGFSAYPQQQQPPPDAASCIYTTALPLIADPPDILGNMAQPSFLSEYDLGGEGDLFKAPEPIIEEPVLSLDPVAAAISMMSGSENVMDETIEVADISDIQNDSLLSEVLYECEKELMEKSAIEETISELLDVKIPMLQVEEFPRETQVQLPAMEKEKPSVPECCSLQKSVSSGCLNSADWINGPARPNFLDFQGLDFETAFGLRRAYSEGDIQNLGASTPRPGNSGNAQLASCERLVTISDLKSEERKQKLSRYRKKKVKRNFGRKIKYACRKALADSQPRVRGRFAKIEEGDLLKPRK

SEQ ID NO: 383 - DNA, 687 bp, Oryza sativa
  ref <308>: DATABASE ACCESSION NUMBER: : LOC_Os01g70110
atggcggcggaggcggcctccggtggcggtggtgggtaccggatgctgccgcaggcggggttgccgatcggtttccggttccgacccaccgacgaggagctcctgctccactacctccgccgcaaggtcatgtcgcgccccctccccgccgacgtcatccccgtcgccgacctcgcccgcctccatccatgggaccttccaggcgagggagacggcgagaggtacttcttccacctgccggcgacgagctgctggcggaggggcggcggcgggagcagggcgggcggcggcggcggcgcgtggagggcgtccgggaaggagaagctcgtcgtcgcgccgcgctgcggcaagcggcccgtcggcgccaagcggacgctcgtcttcttccgccgcggcggcgcccgcaccgactgggccatgcacgagtaccgcctcctccccgccgacgaccatccgccggaggccaacgacgtctgggtggtctgccgcgtattcaagaagaccaccacgctggctcaccgccgttcgccgccgtccatccgtggcgcgccacgccggcgagccgccgccgccgacgacgacgacatgccgtcctcgccgtcgtcctgcgtgacggacggcggcgacgcgggggaggagggagaagagagcagcagctgcagcgtcgtcgcttctaattgtccatga

SEQ ID NO: 384 - protein, 228 aa, Oryza sativa
  ref <308>: DATABASE ACCESSION NUMBER: : LOC_Os01g70110
MAAEAASGGGGGYRMLPQAGLPIGFRFRPTDEELLLHYLRRKVMSRPLPADVIPVADLARLHPWDLPGEGDGERYFFHLPATSCWRRGGGGSRAGGGGGAWRASGKEKLVVAPRCGKRPVGAKRTLVFFRRGGARTDWAMHEYRLLPADDHPPEANDVWVVCRVFKKTTTLAHRRSPPSIRGAPRRRAAAADDDDMPSSPSSCVTDGGDAGEEGEESSSCSVVASNCP

SEQ ID NO: 385 - DNA, 1590 bp, Oryza sativa
  ref <308>: DATABASE ACCESSION NUMBER: LOC_Os12g18120
atggcggacgccgacgcgagggccccgcccaaatcggaccccggcgccacgccgatcggttcgatctccccttcctccgccgcccccgccgccggggaggacgaggtggaggtcgaggtggaggtggaggagcagctcgccggactcgccatcgccgatcagggggaggagctgctgcttcccaagcccaccggctgggaggatggccctgttgttgttgctggagatgaggtctccggtggtgagaagctgccgggtgaggtggcggcggcggtgggggtggagggtgctgcggcggattcgaggccgcggttcccgaggcgacccggggagccggactgcacctactacgtcaagttcgggagctgccgctttgggatgaagtgcaagttcaatcatccggcgaggaagaagaagagtagggtgaaaggtagtaacggtggtagtggcagcggcgggagcaacagcagcagtaacaaagcctcctcgcctgatgatgagcagcaggctccaaaagaggaatacggaagctatgttccagatatttcacctgaagttgattctttgggatttgctgacaaggggagtgcgtctaacttagaaaactttaagaaatattcttatgagattatcgatgtgaagaagggaagagtggagccaaaggaacttaaggttgccaaagagaaaaggaaggaatttatttcagaaggtagttcccaggaggaatgcaagtattattcaacacctggaggatgcaaatttggtaaagcttgtaaatacctccaccgtgatggaaaagaagggaaaacagacgctgaaaaggttgacctgaactttctcggtcttccacttcgtccaggggaaaaggagtgtccctactacatgcgtactgggagctgcaagtacgccactaactgcaagtttcaccatcctgatccttctaatgttgcttctaaagatccacagttggagcatgagaatggggatgctccacagcaagatgttcaaggatcatcgtctcagccaaatgcttcaatttggcccgatcagagaacagtgaatgagcatcatgttccgtttatagctccatctccatcgtacagtgcagggatgcttcctcctcaaggaatgtatccacctcctgaatggaatgggtatcatcaggttccgttgaatccatattatcctcctggagtccctttccaacattttccagctgctcctataaatcatcctatgtacaaggcaccagaaatacctggacatcagcaggttccttccgaggaatacccagagagacctggccaacctgaatgtcagcattttgtgaagagtggtttttgcaaatttaggatgaagtgcaaatatcaccacccaaggtcaccggtgcctccagcaggagctcttagccctcttggcttgcctataaaacctgatcagcctgtgtgcacatactatggtcgctatggggtctgcaaatttgggccagcttgcgcatacaatcaccccttcaattttagccctgtacctgcagcgggacctcctctcctccctgctcaatacccaactccaggaaactacactctctga

SEQ ID NO: 386 - protein, 529 aa, Oryza sativa
  ref <308>: DATABASE ACCESSION NUMBER: LOC_Os12g18120
MADADARAPPKSDPGATPIGSISPSSAAPAAGEDEVEVEVEVEEQLAGLAIADQGEELLLPKPTGWEDGPVVVAGDEVSGGEKLPGEVAAAVGVEGAAADSRPRFPRRPGEPDCTYYVKFGSCRFGMKCKFNHPARKKKSRVKGSNGGSGSGGSNSSSNKASSPDDEQQAPKEEYGSYVPDISPEVDSLGFADKGSASNLENFKKYSYEIIDVKKGRVEPKELKVAKEKRKEFISEGSSQEECKYYSTPGGCKFGKACKYLHRDGKEGKTDAEKVDLNFLGLPLRPGEKECPYYMRTGSCKYATNCKFHHPDPSNVASKDPQLEHENGDAPQQDVQGSSSQPNASIWPDQRTVNEHHVPFIAPSPSYSAGMLPPQGMYPPPEWNGYHQVPLNPYYPPGVPFQHFPAAPINHPMYKAPEIPGHQQVPSEEYPERPGQPECQHFVKSGFCKFRMKCKYHHPRSPVPPAGALSPLGLPIKPDQPVCTYYGRYGVCKFGPACAYNHPFNFSPVPAAGPPLLPAQYPTPGNYTL

SEQ ID NO: 387 - DNA, 759 bp, Oryza sativa
  ref <308>: DATABASE ACCESSION NUMBER: LOC_Os10g30880
atgaggatccgcaagcgcacgccggtcagggccgcctcgccgtcgccgggaccgtcgccgccgccgccgcctccgccggcgcagctgaaggtgaggaggctctgtgccctctgtccctttgacacgttctgtttccgacctcttcttggcttctgccttccttcccgtcgtcccggtgatcctccgccgctcacctgcgactctctgcagggggggagaccaccggtggtccatgccgacgaggaggaggaggagaagaagaagaagaagaagaagaagaagaagaagaagcaggggagcatggtcgtcggcggggacagggaggaggaggaggaggaagaagacgacgacgacgacctggtcctagtcgcctccacgaccagcgagagggacgtcaccggcgccgccgccgccggcaggtgcagccggaacgacggcaagcggtggcgctgcaagagcgcggccgtgccggggtacgtgttctgcgaccggcacatcgcgtggtccacacgcaagcgcaagcccaggaagaggagccactccagcatcgtggacccgccgcagccaaaggaagatcccgccgccgcggcaaaggcagaggacgacgacggcgtggaggaagaggaggagtccaagaaccacggcgctaacctccggtgcaacgacgacgacgacgacgaggagttccactactacggcgggttacagcacggcggcaggaagcgggcgaagagcggcggcggcggcgggccggcgtga

SEQ ID NO: 388 - protein, 252 aa, Oryza sativa
  ref <308>: DATABASE ACCESSION NUMBER: LOC_Os10g30880
MRIRKRTPVRAASPSPGPSPPPPPPPAQLKVRRLCALCPFDTFCFRPLLGFCLPSRRPGDPPPLTCDSLQGGRPPVVHADEEEEEKKKKKKKKKKKKQGSMVVGGDREEEEEEEDDDDDLVLVASTTSERDVTGAAAAGRCSRNDGKRWRCKSAAVPGYVFCDRHIAWSTRKRKPRKRSHSSIVDPPQPKEDPAAAAKAEDDDGVEEEEESKNHGANLRCNDDDDDEEFHYYGGLQHGGRKRAKSGGGGGPA

SEQ ID NO: 389 - DNA, 957 bp, Oryza sativa
  ref <308>: DATABASE ACCESSION NUMBER: LOC_Os04g46220
atgacggcgcgaagcatgttgcggaaccacccggaggcgtcggtgctcgacaccatccggcagcacctgctggaggagccgcgcggcggcggcggtggcgaggcggcggaggcgagcttcgggagcctggtggccgacatgtggagcgactcgctgccgttccgcgacgacgacgccgacgacatggtggtgttcggcgcgatgcgggacgcgttctcgtgcgggtggctgcccgacggcgtgttcgcggaggtgaagccggagcccctgctctcgccggactcgtcgtcgtacgacgggtcctcttgctgcttcggcttcgcggacgtgtcggagccggtgacgccgagcgacgcggcgtcgggggcggcagaagcggcggccgcggcggcggcggcgacggcggagcacgggaaggaggaggaggccgcggctgcggtggcgagggggaagcactacaggggggtgaggcagcggccgtggggcaagttcgcggcggagatccgggaccccgccaagaacggcgcgcgcgtgtggctcggcacgttcgacaccgccgaggacgccgccctggcgtacgaccgcgccgcctaccgcatgcgtggctcccgcgcgctcctcaacttcccgctccgcatcggctcggagatcgcagccgccgccgccgccgcagcggcagcggcagccggcgacaagcggccgtcgccggagccggcgacctcggagtcgtccttctcctcctcatcctcctgcaccaccaccaccacctcctcctcaacctcctcctccggctccccgaaacggagaaagagaggcgaggccgcggccgcgtccatgtccatgcccctggtgcccccgccttcccagctgaactggccggtgcaggcatggtaccccgccgccgcaccggtcgagcaggtggcgatcaccccgcgcgtggagcagctcgtcatctaa

SEQ ID NO: 390 - protein, 318 aa, Oryza sativa
  ref <308>: DATABASE ACCESSION NUMBER: LOC_Os04g46220
MTARSMLRNHPEASVLDTIRQHLLEEPRGGGGGEAAEASFGSLVADMWSDSLPFRDDDADDMVVFGAMRDAFSCGWLPDGVFAEVKPEPLLSPDSSSYDGSSCCFGFADVSEPVTPSDAASGAAEAAAAAAAATAEHGKEEEAAAAVARGKHYRGVRQRPWGKFAAEIRDPAKNGARVWLGTFDTAEDAALAYDRAAYRMRGSRALLNFPLRIGSEIAAAAAAAAAAAAGDKRPSPEPATSESSFSSSSSCTTTTTSSSTSSSGSPKRRKRGEAAAASMSMPLVPPPSQLNWPVQAWYPAAAPVEQVAITPRVEQLVI

SEQ ID NO: 391 - DNA, 951 bp, Oryza sativa
  ref <308>: DATABASE ACCESSION NUMBER: LOC_Os01g54600
atggcggccggagaggaggtgatggatcggtcgacgtcggccgaggacgggtactgcagcgccggcacggactcgccgcgggcggagtccgtcgacgagcaaggggccgccgaggagtcgtcgccccggggagggcagaagcgggagctcccctcgccgtcggcttcgccgtcgtccccgctgccacctgccgcgaagcgcagccggaggtcagtggagaagcgggtggtgtccgtgccgatcgcggagtgcggcgaccggccgaagggcgccggggaggggccgccgccgtcggactcgtgggcctggcgcaagtacggccagaagcccatcaagggctctccctacccaagggggtactacaggtgcagtagctccaaggggtgtccggcgaggaagcaggtggagcgcagccgcgccgaccccaccgtgctgctcgtcacctactccttcgagcacaaccacccgtggccgcagcccaagagcagcagctgccacgcgagcaagtcgtctccccggtcgacggcgccaaagcctgagccggtggctgacggacagcaccccgagccagcggagaacgaatcgtcggcgtcggcggagctggaggtaccggagccggagccggagcaggaatctgagccggttgtgaagcaggaggaggagcagaaggaggaacagaaggctgtggttgagccggcggcggtcacaaccacggtggcgccggcgccggcggtcgaggaggaggatgagaacttcgacttcggatggatcgaccagtaccacccgacgtggcaccggtcgtacgcgccgctgctgccgccggaggagtgggagcgcgagctgcaaggggacgacgcgctgttcgcggggctcggcgagctcccggagtgcgccgtcgtgttcggccgccggcgcgagctcggcctggcggccaccgcgccgtgctcctga

SEQ ID NO: 392 - protein, 316 aa, Oryza sativa
  ref <308>: DATABASE ACCESSION NUMBER: LOC_Os01g54600
MAAGEEVMDRSTSAEDGYCSAGTDSPRAESVDEQGAAEESSPRGGQKRELPSPSASPSSPLPPAAKRSRRSVEKRVVSVPIAECGDRPKGAGEGPPPSDSWAWRKYGQKPIKGSPYPRGYYRCSSSKGCPARKQVERSRADPTVLLVTYSFEHNHPWPQPKSSSCHASKSSPRSTAPKPEPVADGQHPEPAENESSASAELEVPEPEPEQESEPVVKQEEEQKEEQKAVVEPAAVTTTVAPAPAVEEEDENFDFGWIDQYHPTWHRSYAPLLPPEEWERELQGDDALFAGLGELPECAVVFGRRRELGLAATAPCS

SEQ ID NO: 393 - DNA, 1146 bp, Oryza sativa
  ref <308>: DATABASE ACCESSION NUMBER: LOC_Os02g45200
atggatgcggcccactggcatcaggggctagggctagtgaagcccatggaagagatgctgatgggtgcaaatccaaatcctaatgggagctcaaatcagccaccgccaccgccgtcctcggcggccagcgcccagcggcctatcgccccaccggcggctggagcggccgccggcgcgggcgccgccggagctggggctggcacggagcgccgcgcgcggccgcagaaggagaaggcgctcaactgcccgcggtgcaactcgacgaacaccaagttctgctactacaacaactacagcctccagcagccgcgctacttctgcaagacgtgccgccgctactggacggagggcggctcgctccgcaacgtccccgtcggcggcggctcacggaagaacaagcgctcgtcgtcctcggtggtgccgtcggcggccgcgtcggcctccacctccgcggcggtgtccggctcggtccccgtggggctggcggccaagaacccgaagctgatgcacgagggagcgcaggacctcaacctagcgttcccgcaccaccacggccgcgccctgcagccgccggagttcacggcgttcccgagcttggagagcagcagcgtgtgcaaccccggaggcaacctggcggcggcgaacggcgccggtggcaggggcagcgtgggcgcgttctcggcgatggagttgctgaggagcaccggctgctacgttccgctgccgcagatggcgccgctagggatgccggcggagtacgcagctgcggggttccatctcggcgagttccgcatgccaccgccgccacagcagcagcagcagcaacaagctcagaccgtgctcggtttctccctggacacgcacggcgcgggtgcaggcggcggctccggggtgttcggcgcgtgcagcgctgggttgcaagagagcgcggcgggcaggttgctgttccccttcgaggacctgaagccggtggtgagcgccgcggctggcgacgcgaacagcggcggcgatcatcagtacgaccacggcaagaaccaaggtggtggcggcggcgtcatcggtggccatgaggccccagggttctggaatagcagcatgatcggcaacggcagcagcaatggcggcggcggcggcggttcttggtaa

SEQ ID NO: 394 - protein, 381 aa, Oryza sativa
  ref <308>: DATABASE ACCESSION NUMBER: LOC_Os02g45200
MDAAHWHQGLGLVKPMEEMLMGANPNPNGSSNQPPPPPSSAASAQRPIAPPAAGAAAGAGAAGAGAGTERRARPQKEKALNCPRCNSTNTKFCYYNNYSLQQPRYFCKTCRRYWTEGGSLRNVPVGGGSRKNKRSSSSVVPSAAASASTSAAVSGSVPVGLAAKNPKLMHEGAQDLNLAFPHHHGRALQPPEFTAFPSLESSSVCNPGGNLAAANGAGGRGSVGAFSAMELLRSTGCYVPLPQMAPLGMPAEYAAAGFHLGEFRMPPPPQQQQQQQAQTVLGFSLDTHGAGAGGGSGVFGACSAGLQESAAGRLLFPFEDLKPVVSAAAGDANSGGDHQYDHGKNQGGGGGVIGGHEAPGFWNSSMIGNGSSNGGGGGGSW

SEQ ID NO: 395 - DNA, 3561 bp, Oryza sativa
  ref <308>: DATABASE ACCESSION NUMBER: LOC_Os10g21810
atgagcagggtcggagagtgcggcggcggcggcggctgcggggcacggcgagggaaggcggcgcacgccggtgccggggcggtggccgggttcctggggtgcttgctgctggtgtgggcgatgggtgggtgtgggagggggtgtggtggtggtggtggggagggtgtgagggacagggtggaggaggtggcggcgcagttcaacctcagcatgagcaagctgcaggcgctggcgtcgctcctgtcttcgccggagcgggaatgcatatgtaaatctggtacgatcaatgatgataatccagcccacagcatgcctgatatgtcaaattgtcgtcttaagaataaaccatctggaggaaatcaaaacaggctggacaatgtgattattcaagattgttgcgcaaatgaagataattatgacaaaaataatcatgaaaacaatttattgcaaaatgccatgcaacaagacattggctctcctacgacattgtggaatctatgcctatgtgacttgtgtattgtcattaatgggctgaatgtacagcagaataacgccttgagcttcaatcacgggatgatatttagtttgtctgcttcccttggaatagttgtaattttggtagttataactattttcaaaagagggaagcaagcaaatgaactgtgtcagcatgagaaactcctccagacaccgagtgttaagataagtcgaaaatggtcaaagagagccctgcttcttggtgtcttagttgggctttgtagttctgtctggatattttcaagcatgcatgctgatgttgttgctagaagaattgagaatcttgaaaatatgtgtgatgagagagctaggatgctacaagatcagttcaatgtaagcatgaaccatgtgcatgcattggctattttagtctcaacttttcaccatgggaagaatccttctgctattgatcagaaaacatttgaggatttcacggctaggacaacatttgaaaggccattgatgagtggtgttgcctatgctttgaaggtgctgcacagcgaaagggagttgtttgagcaaaagcttggatggaagattaagaaaatggagaccgaagatcaatcccttgttcatgactacaatcctgaaaagcttcagccttcaccagttcaagatgagtatgcacctgttattttctcccaggaaactgtaaagcacattatatcagttgacatgatgtctgggaaggaagatcgtgataatatattgcgctcacgggcaacaggcaaaggggccctaacagcccctttcccacttcttaaatctaatcaccttggtgtggtgctaacgttcactgtgtataagtatgatcttcctccagatgcaactccagaggagcgtattgaagctacgctgggttatcttggtgcctcatttgatgttccgtctctggtggagagactcctggagcaacttgctagcaaacaaaagatagttgttaggctgtatgacatcacaaatcatacttatcctactaaaatgtatgattcggatgttattgcatctgatgatctgcatattagtaatattgatttcggggacccgacacgcaaacacgtaatgcattgcagattcaagcatgcaccttcactgccatggtctgcaattatgatatcttcagcagtagctataattgttttgcttgttggctatattatctatgctactctgaattctcttgaagaggcagaagataattatacgacaatgagagatttaaaaggacgagctgaagctgcagatgttgctaagtcccagtttctagcaactgtttcacatgagattagaactccaatgaatggtgtactaggtatgctacagatgctcatggatacggaacttgatacaactcagcgggattttgtagttacagctcaagaaagtggaaagtcattgataaacttaataaatgaagtacttgatctcgctaagatagaatcaggcaaaattgagctggaggcggtgcgatttgatgtccgtgatattcttgacaatgtggtatctttgttttctgaaaaatcatgggctaagggcatagagttggctgtacttgtatctgatcaagttccagatgttctgatcggggacccgtggcggtttcggcaaatcattacaaatcttgtagggaattctatgaagtttactgaacaaggtcatatcttcattcgagtgcatttaattgaggaagtgaagagaaaaatggaagctctggatgacacttctcctgaaaacatagaagttacagcgaattccaaaaatacgatgccatataatactctaagtgggcttgaagtagcaaataatcggaaaaccttggagagtttcaggatgttcaaagattcgtcagatgcaatagattcagtgaacttactagtaactgtcgaagacactggcataggaataactaaggatgctcaaactcgcatttttacacctttcatgcaagcggatggttccacctcaaggacatatggtggaactggaattggtttgagtattacgaaacgcctggttgaattgatgggtggagaaatagggtttgtgagtaaaccaggagttagtagtacattttcttttactgctattttcaaggaaaataggaaagatccaggggatatcaaaaggtattgtcctgaacctactccaccagattttcaaggaatgagagcgcttgttgttgacggaagatgtgctcgtgctgaggttaccatgtaccatctgcggagacttggaatacaatgtgatcttgcagccacatctgaatcagcactttctgctctattggaatcctgcaattcaagtgtaaaaagcagtctaaatatggtgcttgttgacaaagaagcttggggcgaggactcaggcttggcatttttccggtgtcttatagatcttcggctgaagggcacactcaagtcttggcaaaccatgccaaagttctttcttttggcaggttcaataactcctgctgactctgattgtttgaggttggcggggtattctaatagcataagaaaaccccttcgtcttagtactgttgctgcttgtcttagtaaagcactaggggttggacttacaggccgacgaagtagagataattctttggttcttcgaagtgtactaacaggaaaaaacattttagttgtggacgacaatgctgttaatcgcatagttgcagctggtgctttgaagaaatatggagctatagttacctgtgtggacagtggaaaggaggcaatttctaggctccagccacctcataaatttgatgcttgttttatggatgttcagatgcctgagatggatgggtttgaagctactagattagttcgttctgtagaaagtaaaatcaatgatacgatccaggcagcatctgctaaaaacccatttggagataacaatattgcaaagcagaagagctatgcagtaaatcgagaacagaagtttgattggactgctatttatgtttcatttgacaattggatgaaatctatttcaacatcacgccttcagccatgtgcttaa

SEQ ID NO: 396 - protein, 1186 aa, Oryza sativa
  ref <308>: DATABASE ACCESSION NUMBER: LOC_Os10g21810
MSRVGECGGGGGCGARRGKAAHAGAGAVAGFLGCLLLVWAMGGCGRGCGGGGGEGVRDRVEEVAAQFNLSMSKLQALASLLSSPERECICKSGTINDDNPAHSMPDMSNCRLKNKPSGGNQNRLDNVIIQDCCANEDNYDKNNHENNLLQNAMQQDIGSPTTLWNLCLCDLCIVINGLNVQQNNALSFNHGMIFSLSASLGIVVILVVITIFKRGKQANELCQHEKLLQTPSVKISRKWSKRALLLGVLVGLCSSVWIFSSMHADVVARRIENLENMCDERARMLQDQFNVSMNHVHALAILVSTFHHGKNPSAIDQKTFEDFTARTTFERPLMSGVAYALKVLHSERELFEQKLGWKIKKMETEDQSLVHDYNPEKLQPSPVQDEYAPVIFSQETVKHIISVDMMSGKEDRDNILRSRATGKGALTAPFPLLKSNHLGVVLTFTVYKYDLPPDATPEERIEATLGYLGASFDVPSLVERLLEQLASKQKIVVRLYDITNHTYPTKMYDSDVIASDDLHISNIDFGDPTRKHVMHCRFKHAPSLPWSAIMISSAVAIIVLLVGYIIYATLNSLEEAEDNYTTMRDLKGRAEAADVAKSQFLATVSHEIRTPMNGVLGMLQMLMDTELDTTQRDFVVTAQESGKSLINLINEVLDLAKIESGKIELEAVRFDVRDILDNVVSLFSEKSWAKGIELAVLVSDQVPDVLIGDPWRFRQIITNLVGNSMKFTEQGHIFIRVHLIEEVKRKMEALDDTSPENIEVTANSKNTMPYNTLSGLEVANNRKTLESFRMFKDSSDAIDSVNLLVTVEDTGIGITKDAQTRIFTPFMQADGSTSRTYGGTGIGLSITKRLVELMGGEIGFVSKPGVSSTFSFTAIFKENRKDPGDIKRYCPEPTPPDFQGMRALVVDGRCARAEVTMYHLRRLGIQCDLAATSESALSALLESCNSSVKSSLNMVLVDKEAWGEDSGLAFFRCLIDLRLKGTLKSWQTMPKFFLLAGSITPADSDCLRLAGYSNSIRKPLRLSTVAACLSKALGVGLTGRRSRDNSLVLRSVLTGKNILVVDDNAVNRIVAAGALKKYGAIVTCVDSGKEAISRLQPPHKFDACFMDVQMPEMDGFEATRLVRSVESKINDTIQAASAKNPFGDNNIAKQKSYAVNREQKFDWTAIYVSFDNWMKSISTSRLQPCA

SEQ ID NO: 397 - DNA, 906 bp, Oryza sativa
  ref <308>: DATABASE ACCESSION NUMBER: LOC_Os12g40920
atgaagcgcggcggcgccggtgtcggcggcggcggcggcggcggcgatccgggcgcctacgcggcggtgctgaagacgaagctcgacctgtactgcgcggccgtggctaaatcgatggaagctaaactgcaagaatcttctttgggctacctcaatttacaagcctcagacacttcacaattggtttctcaagattcttttaatggctatggatcaaccagagtaacaaactcaaatgccatacatgaagatgacgatcaaggtaaaccagctaatagtggtacatcaaaggaacagtcagatgatgatggcgatcttgaggaagatacggaccccgttaatgcaaagcggacaaggagaatgctgtcaaatcgggaatcagccaggaggtcaagaaaaaggaagcaagctcacctaaacgatctagaatcacaggtttcccagttaagatctgagaatgcatctctgcaaaagcgcttgtctgacatgactcagaaatataagcaatctaccacagaatatggcaatcttcaagatgacatgaacgctatgaggagaaaggtgaatatagctgaagaagcggtgaggagagtaactggaataggacttcaattgttcactacatctgaaatgcctgcaagcagcatgcccgtttcttcaggtgtatcagacgcagcttctgctgctgctgctgctgctctcgtcgaagacgactggacaaactgtagcctcccagatgaagcaattcctgtgccaagtgcagcaatggccttgaggtcaccgtccgtgcggcgtgtcgcaagcttggagaacctgcagaagagaatccatgctggagatgtgacacattttgaggcagcatcagccttgtcattgcctgaagctactgcctgtgataataagtag

SEQ ID NO: 398 - protein, 301 aa, Oryza sativa
  ref <308>: DATABASE ACCESSION NUMBER: LOC_Os12g40920
MKRGGAGVGGGGGGGDPGAYAAVLKTKLDLYCAAVAKSMEAKLQESSLGYLNLQASDTSQLVSQDSFNGYGSTRVTNSNAIHEDDDQGKPANSGTSKEQSDDDGDLEEDTDPVNAKRTRRMLSNRESARRSRKRKQAHLNDLESQVSQLRSENASLQKRLSDMTQKYKQSTTEYGNLQDDMNAMRRKVNIAEEAVRRVTGIGLQLFTTSEMPASSMPVSSGVSDAASAAAAAALVEDDWTNCSLPDEAIPVPSAAMALRSPSVRRVASLENLQKRIHAGDVTHFEAASALSLPEATACDNK

SEQ ID NO: 399 - DNA, 2052 bp, Oryza sativa
  ref <308>: DATABASE ACCESSION NUMBER: LOC_Os10g40390
atggccgccgcgcctgcgccgaagctgcctccgttcccggcgggcgggttcgtccccgccctgaagccgaaggcggaggcggcgaacgacgaggccgccgctgcggtcgaacagctagccgaggcggcgaagctggccgaggccggcgacgccttcggcgcccgcgagatattggcgcggctcaattaccggctccccgccgcccccacggccgggacgccactgctccgctcagccttctacttcaaggaggctctgcgcctaacgctctcccccaccggcgacgccccagcgccatcggcgtcgacgccgtacgacgtggtcgtcaagctcggcgcctacaaggccttctcggaggtgtccccggtgctccagttcgcgcacctcacctgcgtccaggcggtgctcgacgagctcggcggcgccggatgcatccacgtgctggacttcgacatcggcatgggcgagcagtgggcgtcgctgatgcaggagctcgcgcagctccgcccggccgccgcgctcaaggtgaccgcattggtgtccccggcgtcgcaccacccgctcgagctgcagctcatccacgagaacctctccggcttcgccgccgagctcggcgtcttcttccacttcaccgtcttcaacatcgacaccctggaccccgccgagctcctcgccaacgccaccgcgggcgacgccgtggccgtgcacctccccgtcggccccgcccacgccgccgcgacgccggccgtgctccgcctcgtgaagcgcctcggcgccaaggtggtggtctccgtcgaccgcggctgcgaccgctccgacctccccttcgcggcgcacctcttccactccttccactccgccgtctacctcctcgagtccatcgacgccgtgggcacggacccggacaccgcgtccaagatcgagcggtacctcatccaccccgccatcgagcagtgcgtcgtggccagccaccgcgccgcctccgccatggacaaggcgccgccgccgccgtggcgcgcggcgttcgcggcggcggggttcgcgccggtgcaggcgacgacgttcgcggagtcgcaggcggagtcgctgctgagcaagcttggctctgcttctgcttctgcttgtgcagatgcagagtgccatgtcgcaatggtgttgtactgccctcttatcaaagaaagagagagaaaacgatggaatgtacacctggttattgtattagttgaactaaacacaccccaagctgaaaagaaccaaagggaagtaggaggatatgggggagagaaaaataaaatcctgtcagaatataatctgctgcctctgcctgtgctggagatgcaaaggaaggggggcaatcatggtgtaaagcgtccatgctttactgaaatggcggcaaagcatcttagggtaaggacaggcacatcaagaacagcagcagcaacattggatgggtacaccactttaacctgggactcagctccagaatggccatggcaccgcatgcacaaaccggataggttgagatgggctcactggagagtcactggagagccacagtgtgcagcaggagcagtagcaataggtcaggcaagtggccacactggagtacgggacactgcaggagcaaactggcaagagacctgcatagtagttacagagatggatgttaagcttgctgataaattcagaaaaaagtggtaccacagttcaaaacttcaaaaaagaaggtgcactgttggtttaattaagcaggacttgaaagttcaaaaccagggaggggaatcagaagccagtagacacaaaggcctccagatctcattcagacaggttcagatttcattgcggaagccaaataggaaatgcaagcatagtggccagactgtaaagttgatcaatgagaattgctattacctctccactaaaagaaacaacttaaagataaaagaggtcaactacatatgctatatttatgctgaagaattgcatccactcaaagtcatgttcagaaatacacaagcaaagatatgccaaatagatgtccaaaaatcctag

SEQ ID NO: 400 - protein, 683 aa, Oryza sativa
  ref <308>: DATABASE ACCESSION NUMBER: LOC_Os10g40390
MAAAPAPKLPPFPAGGFVPALKPKAEAANDEAAAAVEQLAEAAKLAEAGDAFGAREILARLNYRLPAAPTAGTPLLRSAFYFKEALRLTLSPTGDAPAPSASTPYDVVVKLGAYKAFSEVSPVLQFAHLTCVQAVLDELGGAGCIHVLDFDIGMGEQWASLMQELAQLRPAAALKVTALVSPASHHPLELQLIHENLSGFAAELGVFFHFTVFNIDTLDPAELLANATAGDAVAVHLPVGPAHAAATPAVLRLVKRLGAKVVVSVDRGCDRSDLPFAAHLFHSFHSAVYLLESIDAVGTDPDTASKIERYLIHPAIEQCVVASHRAASAMDKAPPPPWRAAFAAAGFAPVQATTFAESQAESLLSKLGSASASACADAECHVAMVLYCPLIKERERKRWNVHLVIVLVELNTPQAEKNQREVGGYGGEKNKILSEYNLLPLPVLEMQRKGGNHGVKRPCFTEMAAKHLRVRTGTSRTAAATLDGYTTLTWDSAPEWPWHRMHKPDRLRWAHWRVTGEPQCAAGAVAIGQASGHTGVRDTAGANWQETCIVVTEMDVKLADKFRKKWYHSSKLQKRRCTVGLIKQDLKVQNQGGESEASRHKGLQISFRQVQISLRKPNRKCKHSGQTVKLINENCYYLSTKRNNLKIKEVNYICYIYAEELHPLKVMFRNTQAKICQIDVQKS

SEQ ID NO: 401 - DNA, 1662 bp, Oryza sativa
  ref <308>: DATABASE ACCESSION NUMBER: LOC_Os01g59660
atgtatcgggtgaagagcgagagcgactgcgatatgatccatcaggagcagatggactcgccggtggccgacgacggcagcagcggggggtcgccgcaccgcggcggcgggcccccgctgaagaaggggccatggacgtcggcggaggacgccatcctggtggactacgtgaagaagcacggcgaggggaactggaacgcggtgcagaagaacaccgggctgttccggtgcggcaagagctgccgcctccggtgggcgaaccacctgaggcccaacctcaagaagggggccttcaccgccgaggaggagaggctcatcatccagctccactccaagatggggaacaagtgggctcggatggccgctcatttgccagggcgcactgataatgaaataaagaattactggaatactcgaataaagagatgccagcgagctggcctacccatctatcctaccagcgtatgcaatcaatcctcaaatgaagatcagcagtgctccagtgattttgactgtggcgagaatttgtcaaacgatcttctgaatgcaaatggtctttacctaccagattttacctgtgacaatttcattgctaattcagaggctttaccttatgcaccacatctttcagccgtttctataagcaatctccttggccagagctttgcatcaaaaagctgtagcttcatggatcaggtaaaccagacagggatgctaaaacagtctgatggtgtgcttcctggattgagcgataccatcaacggtgtgatttcctcggtggatcaattctcaaatgactctgagaagctcaagcaggctgtgggttttgactatctccatgaagccaactctaccagcaagattattgcacctttcgggggtgcacttaatggcagccatgcctttttaaatggcaatttctctgcttctaggcccacaagtggtcctttgaagatggagctcccttcactccaagatactgaatctgatccaaacagctggctcaagtacactgtagctcctgcgttgcagcctactgagttagttgatccctacctgcagtctccagcagcaaccccttcagtgaaatcagagtgcgcgtcgccaaggaatagtggccttttggaagagttgattcatgaagctcagaccctaagatccgggaagaaccaacagacatctgtgataagttctagttcttctgtcggtacgccatgtaatactacggttcttagcccagagtttgatatgtgtcaggaatactgggaagaacaacatcctggtccattcctcaatgactgtgctcctttcagtggcaattcattcactgaatccacccctcctgttagcgctgcatcgcctgacatctttcagctctccaaagtttccccagcacaaagcacttcaatgggatctggagagcaagtaatggggcctaaatatgaacctggggacacttcacctcatcctgaaaacttcaggccagatgcattgttttctgggaatacagctgatccatcagttttcaacaatgccatagcaatgcttctgggcaatgacttgagtatcgattgcagacctgttcttggcgacggtatcatgttcaattcttcctcgtggagcaacatgccacacgcctgtgaaatgtcagaattcaaatga

SEQ ID NO: 402 - protein, 553 aa, Oryza sativa
  ref <308>: DATABASE ACCESSION NUMBER: LOC_Os01g59660
MYRVKSESDCDMIHQEQMDSPVADDGSSGGSPHRGGGPPLKKGPWTSAEDAILVDYVKKHGEGNWNAVQKNTGLFRCGKSCRLRWANHLRPNLKKGAFTAEEERLIIQLHSKMGNKWARMAAHLPGRTDNEIKNYWNTRIKRCQRAGLPIYPTSVCNQSSNEDQQCSSDFDCGENLSNDLLNANGLYLPDFTCDNFIANSEALPYAPHLSAVSISNLLGQSFASKSCSFMDQVNQTGMLKQSDGVLPGLSDTINGVISSVDQFSNDSEKLKQAVGFDYLHEANSTSKIIAPFGGALNGSHAFLNGNFSASRPTSGPLKMELPSLQDTESDPNSWLKYTVAPALQPTELVDPYLQSPAATPSVKSECASPRNSGLLEELIHEAQTLRSGKNQQTSVISSSSSVGTPCNTTVLSPEFDMCQEYWEEQHPGPFLNDCAPFSGNSFTESTPPVSAASPDIFQLSKVSPAQSTSMGSGEQVMGPKYEPGDTSPHPENFRPDALFSGNTADPSVFNNAIAMLLGNDLSIDCRPVLGDGIMFNSSSWSNMPHACEMSEFK

SEQ ID NO: 403 - DNA, 1461 bp, Oryza sativa
  ref <308>: DATABASE ACCESSION NUMBER: LOC_Os02g48370
atgaacggcgccacggccggctccggctccggctccgaccacgacgacgcgcgcgccgccgaggaggccagaggggaggaggcggcaggccgtgccgtggaggttgaggaggaggaggaggaggaggaggcggtgcccgtggcggaggagagggccgcgtggggcggcggcggcactcccccgacccccgagccgaagagcgacgcggacgcggagggcgcgggctcgctggatcgggtggagctcaatgcaggggcgggcggcggccgtgagcgcgaggacgacgagggggaggacgaggccgtgggggcgaggggggtggagatgaacggggaggacgccatgagccacgacggccacgacggcgatgaggatggcgatgacgaggaggacggcgacgacggcgaggaggaggaggaggaggatgatgatgaggaggatgacgatgacgactccacccccgatgcgtcgccgagggcggaggcgaaggcggagggcgagagctccaccgtgatggcgggctgcgccaaccagcccgctgagcccgaccccttcctcgacggtgacgactctggaacggaggaggagcaggcggcgttcatggtggagctggagcgcttccacagggagcacggcctcgagttcaagcctcccaagttctatggcaaaggtctcaactgcctcaagttatggaggcaggttgcccacctgggaggccatgagcaggtaacaatttgtaaactatggcgtcaagttggagagactttcaggccgccaaagacgtgcactactgtatcgtggtcgttccgaattttctatgagaaggcacttctcgagtatgaaaaatacaaagtccgaactggccagcttcaagtaccattgtctgctttaccacagcctggtggtactggccgtgagattggtatgaatcaatcatcttctgccagagttagaagggattctgcagcgcgtgctatgcagggttggcatgctcaccgtctccttaccaatggcatatatggagatcaaatgttgaaggaaaaagattcagtcccttcttcaagtcgtggagtactcaagaggaagaaagcatctagtccagagtgtgctatcaaggtgtctcgtacaaaaataaacaaatcacaggatgactcaatggtcactgatgttggagaacctgccgagtgggtgaagattaatgtacgacagactaaagattgtttcgaaatctatgctctggttcctggacttctacgcgaagaggtgcatgttcagtcagatcctgctgggcgtctggttataactggggacccagagcagcctgataatccttgggggatcactccattcaagaaggtggtcaatctgccattgaggatcgatcctcatcaaacatccgccgttgtcacgcttcatggccaactatttgttcgtgcaccatttgggcatgctgatatgtag

SEQ ID NO: 404 - protein, 486 aa, Oryza sativa
  ref <308>: DATABASE ACCESSION NUMBER: LOC_Os02g48370
MNGATAGSGSGSDHDDARAAEEARGEEAAGRAVEVEEEEEEEEAVPVAEERAAWGGGGTPPTPEPKSDADAEGAGSLDRVELNAGAGGGREREDDEGEDEAVGARGVEMNGEDAMSHDGHDGDEDGDDEEDGDDGEEEEEEDDDEEDDDDDSTPDASPRAEAKAEGESSTVMAGCANQPAEPDPFLDGDDSGTEEEQAAFMVELERFHREHGLEFKPPKFYGKGLNCLKLWRQVAHLGGHEQVTICKLWRQVGETFRPPKTCTTVSWSFRIFYEKALLEYEKYKVRTGQLQVPLSALPQPGGTGREIGMNQSSSARVRRDSAARAMQGWHAHRLLTNGIYGDQMLKEKDSVPSSSRGVLKRKKASSPECAIKVSRTKINKSQDDSMVTDVGEPAEWVKINVRQTKDCFEIYALVPGLLREEVHVQSDPAGRLVITGDPEQPDNPWGITPFKKVVNLPLRIDPHQTSAVVTLHGQLFVRAPFGHADM

SEQ ID NO: 405 - DNA, 1791 bp, Oryza sativa
  ref <308>: DATABASE ACCESSION NUMBER: LOC_Os02g46490
atgggcagcggcgcgtcacggctgctgaccgcgtgcacgtgctcgcggccggcgccggcgtccgtggacgcggagccgtgcctggacgacgctctcggccactccttctgctacgccgccgccgccacggccaccgcccactcctcgtcgttccgccacggcatctccggcgccgcgctctccgccaactcgtcggtgcccgtcccgctctacaacgcgtccgccgccgccggcggcgtggcgccggggtactcctcggcattccacacctcgtcgtccttttcctccgcgccgctgcagctgtccaacctctcctcgggcccgctgttcctctcgggtcccatcgaccgcgccggccagctctccggcccgctcgaccccgccgtgcccttctctggcccgctccccgcaaagcctcccaagcccgcgtcctcctcatcgagggggttctcgaggaggttccggaagccgtccttcggcagcctgcggcggagcgtgtcggagaagaaccgcccgtgcgccgtgccgctccgccgcgacgacggcgtgcagtgggcgcacggccgcgccggggaggaccgcgtccacgtggtggtctccgaggatcagcggtggctcttcgtcggcatctacgacggcttcaacggccccgaggcccccgacttcctcgtcaccaacctctaccgcttcctcctccgcgagctccgcgggatcttctacaaggaggccgacgcggacaacaagaagctctggcagtttctcgtggacggcgacgacgacgacagcgagctcgacttctcgggctctggccggttcgcgctgtcactcgacaggctcaaggagagtcggtttcacatgtgggcgcacgccgcggccgacgagagcggcagggaatggggttccaggaggttggcaccggcgcctgcggtgagggaccatgcggcggtgctagccgctctcacccgggccctggcctcgacggaagcggcgtacttggacatgaccgaccagtcaatgggaacccatccggagttggcggtcaccggggcgtgcctgctcgtggccctcgtgagggacgacaacgtgtacgtgatgaaccttggggacagccgtgccattgtggcgcagcgtccggacgatggcgacgatggctgtgtgtttggaaccatgcggcggatggaggacgtcggggtgggcttggagatcgagacaaggcccggcggatgcgccattattgggcttaagccactgcagctgtcgactgatcacagcaccagcatcgaagaggaagttcacaggatcaaacgtgaacatcctgatgatgatcagtgtattgtaaatgatagagtgaagggtcgcctaaaagttacccgggcttttggtgcaggctatctcaaacaggcaaaattgaacaatggattgttagagatgttccgcaatgattacattggtgatacaccgtatatatcatgcacaccatcgctttgccatcacaagctcactgcaagggatcagtttttggttctttcttccgatggcttatatcagtacctgagcaacgaggaggtagttttgcatgttgagaatttcatggagaggtttccagaaggtgatcctgcacaaagtttaattgaggagcttctctctcgtgcagcaaagaaggctggtatggatttttatgagttactagatatacctcaaggggaccgaagaaaataccatgatgatgtcactgtcatggttatttctctggaagggagaatctggaagtcgtccggaacatatgtgtga

SEQ ID NO: 406 - protein, 596 aa, Oryza sativa
  ref <308>: DATABASE ACCESSION NUMBER: LOC_Os02g46490
MGSGASRLLTACTCSRPAPASVDAEPCLDDALGHSFCYAAAATATAHSSSFRHGISGAALSANSSVPVPLYNASAAAGGVAPGYSSAFHTSSSFSSAPLQLSNLSSGPLFLSGPIDRAGQLSGPLDPAVPFSGPLPAKPPKPASSSSRGFSRRFRKPSFGSLRRSVSEKNRPCAVPLRRDDGVQWAHGRAGEDRVHVVVSEDQRWLFVGIYDGFNGPEAPDFLVTNLYRFLLRELRGIFYKEADADNKKLWQFLVDGDDDDSELDFSGSGRFALSLDRLKESRFHMWAHAAADESGREWGSRRLAPAPAVRDHAAVLAALTRALASTEAAYLDMTDQSMGTHPELAVTGACLLVALVRDDNVYVMNLGDSRAIVAQRPDDGDDGCVFGTMRRMEDVGVGLEIETRPGGCAIIGLKPLQLSTDHSTSIEEEVHRIKREHPDDDQCIVNDRVKGRLKVTRAFGAGYLKQAKLNNGLLEMFRNDYIGDTPYISCTPSLCHHKLTARDQFLVLSSDGLYQYLSNEEVVLHVENFMERFPEGDPAQSLIEELLSRAAKKAGMDFYELLDIPQGDRRKYHDDVTVMVISLEGRIWKSSGTYV

SEQ ID NO: 407 - DNA, 1497 bp, Oryza sativa
  ref <308>: DATABASE ACCESSION NUMBER: LOC_Os02g32590
atggaccacaacaccgaccctcctccgaccaccatggtggacgccgcggcggcgctgctgctggagcccaagctggaggggtacgacgacgacggcggcggcgagccgctgcagccggccccgttcgtctctccgctggaccagctgatgcagccgccgcggccgctggaggcgctgctgcaggggccgcagctgccgccgttcctgtccaagacgtacgacctggtgtgcgagccggagctggacggggtcatctcctggggccacgccggcaacagcttcgtcgtctgggacccctccgccttcgcgcgcgacgtgctcccccaccacttcaagcacaacaacttctccagcttcgtccggcagctcaacacctatggttttcgcaaggttcatgctgatagatgggagtttgctcatgaggatttcctacgacatagcaaacatttgttgaagaagattgtccggcgcaggtcctcaccaacacaacaaagtggtcttcagcctggctcttctggtgaatccggtttagaccctgaactcaacacactgagaagggagaagagtgcattgcttcaggaggtgaccaggctgaagcaagagcaccttcagacaattgaacaaatgagcacgctgaatcagaggctagaatcagcggaagatcggcagaaacagatggtctctttcttggccaagctcctccagaacccaactttcctgaggcaacttaagatgcacagacagcaaaaggaaatcgactccaccagagtgaaaaggaaattcctcaagcatgtaccacatggcaacattgactcaggtgagtccagctcacaacacactggagagagcaatttagatttctcccctacgtccctggaccttccagccacgcacagtgacatcttagaccttcagaattttcttttggaagatggggacctcaatcttgccatgctgccagagaacataggacttgatggaatcgaagcaccagacgacatcggggcgttggttcagggatttgacacacaggaggaacttgagcttggtagcggagttgagctactggaaatacctccagcttctggtcctcgtggccaagatcccacgattggcagatccaagggaaagaatgtattgtctccaggattggatgctacctcttctgaagctgattgcctcggatcattttctgacaatatggggatgctttctgactccatgttacaaacagcgggtaaattgatggatgcagatgatgacgagcgaatttggggcgtcgatgcttcgtcggctttacaaagttcttgcagtggcactagtcagcaagcatatggtagtcttgttagtgatccctatctgatggagatggctaataagcctgaaaaattctgggagctcgattttcaggcactggatgatggagatctgcagctggacaagtgtgttatcgatgaccctgctcttcagcaacagagaggaaatatgaattcgtag

SEQ ID NO: 408 - protein, 498 aa, Oryza sativa
  ref <308>: DATABASE ACCESSION NUMBER: LOC_Os02g32590
MDHNTDPPPTTMVDAAAALLLEPKLEGYDDDGGGEPLQPAPFVSPLDQLMQPPRPLEALLQGPQLPPFLSKTYDLVCEPELDGVISWGHAGNSFVVWDPSAFARDVLPHHFKHNNFSSFVRQLNTYGFRKVHADRWEFAHEDFLRHSKHLLKKIVRRRSSPTQQSGLQPGSSGESGLDPELNTLRREKSALLQEVTRLKQEHLQTIEQMSTLNQRLESAEDRQKQMVSFLAKLLQNPTFLRQLKMHRQQKEIDSTRVKRKFLKHVPHGNIDSGESSSQHTGESNLDFSPTSLDLPATHSDILDLQNFLLEDGDLNLAMLPENIGLDGIEAPDDIGALVQGFDTQEELELGSGVELLEIPPASGPRGQDPTIGRSKGKNVLSPGLDATSSEADCLGSFSDNMGMLSDSMLQTAGKLMDADDDERIWGVDASSALQSSCSGTSQQAYGSLVSDPYLMEMANKPEKFWELDFQALDDGDLQLDKCVIDDPALQQQRGNMNS

SEQ ID NO: 409 - DNA, 1935 bp, Oryza sativa
  ref <308>: DATABASE ACCESSION NUMBER: LOC_Os04g54400
atggcgattacgaaggttctcggatcgaaacctgccgactgcttccaatttcaagatcctaattcctggacttgcatgactgagcttgtaagcgatgtggtcgttgaggttggagatttctccttccatctccacaagttcccattgatgagccgaagtggcacgctgcaaaagctgataagcgaagcagccgccggcgccgacgacggcgagccgtgcagcgtcaagctccacgacgtccccggcggcgccgcggcgttcgagctggcggccaggttctgctacgacgtcagggcggagctcgacgccgggaacgtggtcgcgctgcggtgcgcggcggagcacctcggcatgaccgaggaccacggcggcgagggcaacctcgtcgagcaggcggaggcgttcctccgcgacgtgctcggcagctgggacgacgccttgcgcgcgctgcggtcgtgcgacggcgcgctcctcccgctcgccgaggagctcctcgtcgtgccgcgctgcatcgacgcgctggcgagcaaggcctgcgccgacccgaccctcttcggctggccgatggtggagtactacacggcgaggggcctcgaggagacggtgatgtggaacggcatcgccaccgccggcaagccgaggtcgccgggcccggactggtggtacaagcaggcgtcgtcgctgaagctgccggtgtacaagaggctcatcacggcgatgaggtccaagggcatgagccccgagaacatcgccggctcgctgacgcactacgccaagcgccacctctccggtctgacccgccactccggttacgtcggcggcggcggcgcgtcggggaccgtgctctcggacgtggagcagagggcgctcctggaggagatcgtcgcgctgctccccgtcgagaggggcgtcgccacgacgaggttcctgctcgggctcctccgcaccgccacgatcctgaacgccggcgcggcgtgccgcgacgcgctggagaggatggccgggaaccagctcgaggaggcggcgctggaggacctcctgatccccaacaccggctacgccgtcgagacgctctacgacgtcgactgcgtgcagcggatgctggagcagttcgtcgccgcgaacacgtcggcgttcgccgcctcgccggagatcacggacgaagcccagctggtcgacggcccctccggtgagctcatgccgatcagcacggtggccaagcttgtcgacggctacctcgcggaggtcgcgacggacaccaacgtcaagctctccaagttccagagcatcgccgagctcgtcccggactacgcaagggccatcgacgacggcatctaccgcgccattgacatctacctcaaggcgcactcgtggctgacggcgtcggagagggagcagctgtgcaggctgatgaactgccagaagctgtcgctggaggcgtgcacgcacgcggcgcagaacgagcggctgccgctgcgggtggtggtgcaggtgctcttcttcgagcagctccggctgcgcaccacggtggccgggtggttcttcgtcgccgacaacgtcgaccagggctcccccatcgccgccggccggtacgcgccggagaggagcggcgagctggacttcggggcggggccgccggaggaggaggatggcgacgacgacgacgacgaggcccggaacaacgtgcggtcgtcgtcgtcggcgacgatgagcgtggacgacatcaggcagcgggtggtggagctcgaggaggagtgctcgagcatgagggaggagatccaccggatcgggaagcccaagggcgcgctgagtaggctgttccggaagctcgggctcggcgggaggtcggcggcgaggcggcagcagcagcagccgccgccgccgccgacgagctccggcgacgagaggcggaagtcgatgtccttggagtgttaa

SEQ ID NO: 410 - protein, 644 aa, Oryza sativa
  ref <308>: DATABASE ACCESSION NUMBER: LOC_Os04g54400
MAITKVLGSKPADCFQFQDPNSWTCMTELVSDVVVEVGDFSFHLHKFPLMSRSGTLQKLISEAAAGADDGEPCSVKLHDVPGGAAAFELAARFCYDVRAELDAGNVVALRCAAEHLGMTEDHGGEGNLVEQAEAFLRDVLGSWDDALRALRSCDGALLPLAEELLVVPRCIDALASKACADPTLFGWPMVEYYTARGLEETVMWNGIATAGKPRSPGPDWWYKQASSLKLPVYKRLITAMRSKGMSPENIAGSLTHYAKRHLSGLTRHSGYVGGGGASGTVLSDVEQRALLEEIVALLPVERGVATTRFLLGLLRTATILNAGAACRDALERMAGNQLEEAALEDLLIPNTGYAVETLYDVDCVQRMLEQFVAANTSAFAASPEITDEAQLVDGPSGELMPISTVAKLVDGYLAEVATDTNVKLSKFQSIAELVPDYARAIDDGIYRAIDIYLKAHSWLTASEREQLCRLMNCQKLSLEACTHAAQNERLPLRVVVQVLFFEQLRLRTTVAGWFFVADNVDQGSPIAAGRYAPERSGELDFGAGPPEEEDGDDDDDEARNNVRSSSSATMSVDDIRQRVVELEEECSSMREEIHRIGKPKGALSRLFRKLGLGGRSAARRQQQQPPPPPTSSGDERRKSMSLEC

SEQ ID NO: 411 - DNA, 999 bp, Oryza sativa
  ref <308>: DATABASE ACCESSION NUMBER: LOC_Os02g39710
atggaggcggtggaggacaaggcgatggtgggagtgggaggagcggtggcggcggggtactcctcgtcgtcgtgggggttggggacgcgggcgtgcgactcgtgcggcggggaggcggcgcggctctactgccgcgcggacggggcgttcctgtgcgcccggtgcgacgcgcgggcgcacggcgccgggtcgcgccacgcgcgggtgtggctgtgcgaggtgtgcgagcacgcgcccgccgccgtcacgtgccgggcggacgccgcggcgctgtgcgccgcctgcgacgccgacatccactcggcgaacccgctcgcgcgcaggcacgagcgcctccccgtcgcgcccttcttcggcccgctcgccgacgcgccgcagcccttccccttctcccaggccgccgcggatgccgccgcggcgcgggaggaggatgcggatgatgaccggagcaacgaggccgaggcggcgtcgtggcttctccccgagcccgacgacaatagccacgaggatagcgccgcagccgccgacgcgttcttcgccgacaccggcgcgtacctcggcgtcgacctggacttcgcccggtccatggacggaatcaaggccatcggggtaccggtcgcgccgcccgagctggacctcaccgccggcagccttttctaccccgaacactccatggcccacagcttgtcgtcgtcggaggtcgcgatcgtaccggacgcgctgtcggcgggctcggcggcgccgcccatggtggtggtggtggcgagcaaggggaaggagagggaggcgcggctgatgcggtacagggagaagcgcaagaaccggcggttcgacaagaccatccggtacgcgtcccgcaaggcgtacgccgagacgcggccgcgcatcaagggccggttcgccaagcgcaccgccgacgccgacgacgacgacgaggcgccatgctcgccggcgttctccgccctcgccgcgtcggacggcgtcgtgccgtcgttctga

SEQ ID NO: 412 - protein, 332 aa, Oryza sativa
  ref <308>: DATABASE ACCESSION NUMBER: LOC_Os02g39710
MEAVEDKAMVGVGGAVAAGYSSSSWGLGTRACDSCGGEAARLYCRADGAFLCARCDARAHGAGSRHARVWLCEVCEHAPAAVTCRADAAALCAACDADIHSANPLARRHERLPVAPFFGPLADAPQPFPFSQAAADAAAAREEDADDDRSNEAEAASWLLPEPDDNSHEDSAAAADAFFADTGAYLGVDLDFARSMDGIKAIGVPVAPPELDLTAGSLFYPEHSMAHSLSSSEVAIVPDALSAGSAAPPMVVVVASKGKEREARLMRYREKRKNRRFDKTIRYASRKAYAETRPRIKGRFAKRTADADDDDEAPCSPAFSALAASDGVVPSF

SEQ ID NO: 413 - DNA, 711 bp, Oryza sativa
  ref <308>: DATABASE ACCESSION NUMBER: LOC_Os02g02480
atggacggaggcggagaccccgttgacgagttcctcatcggcggcggcggcgaggacggcgacctcggcgtcttctgcgacggtgtgccgacgctgccctgcgatggaggacttgggattgatgatgtcagtggagatacttgttgccttgaccaatctgttttagggaaaagaggtagagatgaatcatcatcatctggtccaaagtccaaagcttgccgtgagaaaattcggagggatagactgaatgacaggttccttgagttatcttccgttatcaatcctgacaagcaagctaagttggataaagcaaatatcttgagtgatgcagctcgtctgttggcagaactcagaggcgaggcagaaaagcttaaagaatctaatgagaagctacgagaaacaatcaaggaccttaaggtggagaagaatgaactccgtgatgagaaagttactctgaaggcagagaaggagaggctggaacagcaagttaaagcattgagtgttgctcctacaggatttgttcctcatctccctcatccagctgcattccatcccgctgcattccctccatttataccaccttatcaagctctgggcaacaaaaatgctcctacgcccgcagcattccaagggatggcaatgtggcagtggttgcctccaactgctgtggacacaactcaagatccaaagctttggccaccaaatgcttaa

SEQ ID NO: 414 - protein, 236 aa, Oryza sativa
  ref <308>: DATABASE ACCESSION NUMBER: LOC_Os02g02480
MDGGGDPVDEFLIGGGGEDGDLGVFCDGVPTLPCDGGLGIDDVSGDTCCLDQSVLGKRGRDESSSSGPKSKACREKIRRDRLNDRFLELSSVINPDKQAKLDKANILSDAARLLAELRGEAEKLKESNEKLRETIKDLKVEKNELRDEKVTLKAEKERLEQQVKALSVAPTGFVPHLPHPAAFHPAAFPPFIPPYQALGNKNAPTPAAFQGMAMWQWLPPTAVDTTQDPKLWPPNA

SEQ ID NO: 415 - DNA, 1563 bp, Oryza sativa
  ref <308>: DATABASE ACCESSION NUMBER: LOC_Os04g33080
atggtggatgaggaactgtttgataagagctccaatgatcacagcatcagttctgaggaagaagacatgcttgtcaggagttatagcaatctcaacgtcagctttggataccattgtaattcttatcagtgtttttctctagacactgatgagtatgacatctctcccaacaagaggcttgaaactaataccatgatgacatcacaaaatggatccttcacttgtttgtctggtgctgcgattagtgccaatttcacgctggccaatacaaacatttgcaagggtcttatcggggaagaaattttaccagaactagactctcctaattctttcagaaaaattgtttcatccccatcaatgtcaagattggacttgttatccacctcacaaggcagccctgtatcgactgagagctctatatttgaaatcagtaaaaatatctggaggtccagtgccccaactactgtctcatccaattttctgacaagtacagagataaaaatggctggtggagctgctggagaggatagagtccaagctgtgtgctctgagaagaatggatggttgatttgtggaatatatgatggatttaatggacgagatgcagctgactttttggcagtaactttatatgataatatagtatattacctatatttgttagagtgccggattaaacaagaaaatggtctatatggttcaccagagggctctcttaatggtgttaaaagtgagttaacactggccatgagatttgcagaaaatgaagatgtgaaattttctgaaacatttcgagctggtgtgcttaagtgcctcactactgctgttgagcaagctgaaaatgactttttatgcatggttgaacaagagatggacgatagaccagatttagtatcagttgggtcttgtgttctggttgtgcttctacatggaacagatttgtgcatcttaaatcttggggatagtagagctgtgcttgcttcagtgccgtcttcaggaatggataaattgaaggctgttcaattgactgagatccactcacttgaaaatccattggagtaccaaaaacttttagctgatcatcctaatgagccatcagttgtgatgggtaacaaaataaaggggaagctgaaggttactcgtgcttttggagttggctatctaaaacagaagaagttgaacgatgcactcatgggaattctccgagttcgtaatttgtgcagcccgccttatgtgtacacaaatcctcacacagttagtcataaagtcacagaggatgatttgtttgttgtgcttggtagtgatggcttatttgatttcttcagcaatgacgaagttgttcagttggtttatcaatttatgcatgataatccaattggtgatcctgcaaagtatctcattgagcaacttttacttaaagcagcgaaggaagcagctttaacagctgaagaattgatgaggatacctgttgggagcaggagaaagtaccacgatgatgttaccatcattgttatcatccttggaaatgctcaaaggacaatgacagcgtcaacttcactctga

SEQ ID NO: 416 - protein, 520 aa, Oryza sativa
  ref <308>: DATABASE ACCESSION NUMBER: LOC_Os04g33080
MVDEELFDKSSNDHSISSEEEDMLVRSYSNLNVSFGYHCNSYQCFSLDTDEYDISPNKRLETNTMMTSQNGSFTCLSGAAISANFTLANTNICKGLIGEEILPELDSPNSFRKIVSSPSMSRLDLLSTSQGSPVSTESSIFEISKNIWRSSAPTTVSSNFLTSTEIKMAGGAAGEDRVQAVCSEKNGWLICGIYDGFNGRDAADFLAVTLYDNIVYYLYLLECRIKQENGLYGSPEGSLNGVKSELTLAMRFAENEDVKFSETFRAGVLKCLTTAVEQAENDFLCMVEQEMDDRPDLVSVGSCVLVVLLHGTDLCILNLGDSRAVLASVPSSGMDKLKAVQLTEIHSLENPLEYQKLLADHPNEPSVVMGNKIKGKLKVTRAFGVGYLKQKKLNDALMGILRVRNLCSPPYVYTNPHTVSHKVTEDDLFVVLGSDGLFDFFSNDEVVQLVYQFMHDNPIGDPAKYLIEQLLLKAAKEAALTAEELMRIPVGSRRKYHDDVTIIVIILGNAQRTMTASTSL

SEQ ID NO: 417 - DNA, 1191 bp, Oryza sativa
  ref <308>: DATABASE ACCESSION NUMBER: LOC_Os09g26420
atgtgcggcggagcaatcatctccgggttcatcccgccgtcggccgctgcggcggcggcggctgcggtggccaagaagcagcagggcaggagggtcacggccgacgtgctgtggccggggatgctgcggaaggggaaggcggcggcggcggaggaggactttgaggccgacttccgcgagttcgagcgtggcatgagcgacgacgaggcggaggggggcggcggcgaggaggaggaggacgacgacgacgtggtcgtggtggtccccccgccggcggcggcgaggttcgtcgtccgtgccgcggccaaggcggcgcccccaactgcagatgggatgttgactacaaagcttgtccaacatgatggacctactgctagatcagcaaagcacaagaggaagaatcagtacagggggatccgccagcgtccctggggcaaatgggcagctgaaatccgagaccccagcaagggtgtccgtgtttggcttggaacatataacactgctgaggaggcagctagggcatatgacgctgaagcccgcaagatccgtggcaagaaagccaaggtcaactttcctgatgaaccagctgttgctcagaagctctccctgaagcaaaacgctgccaagcaagagaaactagctccacctctgaagacctgtggcgatgatgctttctttcagctaaacagttcagacaatgatttgtttgcaatgcttgcaaaggtgcctgcaaagccggcagagcctgttgatctcatgcctccagtcaaacctcttgcttccactgagacattcgagatgaacatgctctctgatacgagcagcaactcatttggctcttcagactttggttgggaggatgacaccctgaccccagactacacttcagtcttcgttcctaatgctgccatgccagcatatggtgaacctgcttacctgacaggtggagcgccaaagagaatgaggaacaactatggtatcgccgtgccccagggaaatggcatgcctaatctcgcacaaaacatgcccaccttcgatcccgagatgaagtatttgccattaccttatgttgagagcagctcagatgaatcaatggacaaccttctgcaaaatgatgctacacaagacggggcaagcaacgagggcatctggagccttgatgagctgctcatggcagctggtgcctactga

SEQ ID NO: 418 - protein, 396 aa, Oryza sativa
  ref <308>: DATABASE ACCESSION NUMBER: LOC_Os09g26420
MCGGAIISGFIPPSAAAAAAAAVAKKQQGRRVTADVLWPGMLRKGKAAAAEEDFEADFREFERGMSDDEAEGGGGEEEEDDDDVVVVVPPPAAARFVVRAAAKAAPPTADGMLTTKLVQHDGPTARSAKHKRKNQYRGIRQRPWGKWAAEIRDPSKGVRVWLGTYNTAEEAARAYDAEARKIRGKKAKVNFPDEPAVAQKLSLKQNAAKQEKLAPPLKTCGDDAFFQLNSSDNDLFAMLAKVPAKPAEPVDLMPPVKPLASTETFEMNMLSDTSSNSFGSSDFGWEDDTLTPDYTSVFVPNAAMPAYGEPAYLTGGAPKRMRNNYGIAVPQGNGMPNLAQNMPTFDPEMKYLPLPYVESSSDESMDNLLQNDATQDGASNEGIWSLDELLMAAGAY

SEQ ID NO: 419 - DNA, 429 bp, Oryza sativa
  ref <308>: DATABASE ACCESSION NUMBER: LOC_Os02g58670
atggcggagcagctgggcggcgtgggcagcccgcagctaagcctgagcagctgcagctccttcctttccatctccagcgccggtaccagcgccgccgatggtgctccccatctatccctcggcgtgggcggcgccgaggagctggatctgctgctgcaggtgggcataggcggtggcggtggcggcggcggcgacgaggaagaggaggagcgcaagaccatccggatgatgaagaacagggagtcggcgctgcgctccagggcaaggaagagggcgtatgtgcaggagctggagaaggaagttcgccggctggtgaatgagaatctcaagctcaagaggcactgcaaacaacttaagacggagatggctgctctgatccagcagcctaccaacaagcagagttcccaccgaagaagctcatccacttga

SEQ ID NO: 420 - protein, 142 aa, Oryza sativa
  ref <308>: DATABASE ACCESSION NUMBER: LOC_Os02g58670
MAEQLGGVGSPQLSLSSCSSFLSISSAGTSAADGAPHLSLGVGGAEELDLLLQVGIGGGGGGGGDEEEEERKTIRMMKNRESALRSRARKRAYVQELEKEVRRLVNENLKLKRHCKQLKTEMAALIQQPTNKQSSHRRSSST

SEQ ID NO: 421 - DNA, 849 bp, Oryza sativa
  ref <308>: DATABASE ACCESSION NUMBER: LOC_Os02g49440
atgcaggagttccagtccatcccggggctcgccgggcggctgttcggcggcgcggcggcggctgacatccggcgcgcgcaggcgcagcagggcccggcgtcgcggtgcggcgggataccgtcgccggaggcggtgaagtgcccgcggtgcgagtcgaccaacaccaagttctgctactacaacaactacaacctctcgcagccgcgccacttctgcaagagctgccgccggtactggaccaagggcggcgtcctccgcaacgtccccgtcggcggcggctgccgcaagaccaagcgtagcggcagctcgtccgctgcgtcctcggccccgtcgacgccgacggcggcaactgacaacgccaagaaccagcggcgcgcctcggcgtcgtccccacgatccagtagcggcggtagcggcaacacgagccccacggccgccgcggcgacgaccccgacgacaccggccacgccgtcgtcgaacaccatcgccgtcataaaccacgcgacgacgacgacgacgacgacgaaccccttcccgacagacgtgccacctccggcgccgattttcgccgaccaagcggcagcgctcgcgtcactgttcgcccctcctccgccgccgcctctcccggtgttcagcttcgcagcgcaggcgaagaccgaggacgggattgcctccgttctactcgccggacagacgacggcgcccactgccgccaccgttgccgacatgacgccgttcacgtcgctggacgcggggatcttcgagctcggcgacgtgccgccggcggcgtactggaacgccgggagctgctggacggacgtcccggacccgaatgtctacctaccctag

SEQ ID NO: 422 - protein, 282 aa, Oryza sativa
  ref <308>: DATABASE ACCESSION NUMBER: LOC_Os02g49440
MQEFQSIPGLAGRLFGGAAAADIRRAQAQQGPASRCGGIPSPEAVKCPRCESTNTKFCYYNNYNLSQPRHFCKSCRRYWTKGGVLRNVPVGGGCRKTKRSGSSSAASSAPSTPTAATDNAKNQRRASASSPRSSSGGSGNTSPTAAAATTPTTPATPSSNTIAVINHATTTTTTTNPFPTDVPPPAPIFADQAAALASLFAPPPPPPLPVFSFAAQAKTEDGIASVLLAGQTTAPTAATVADMTPFTSLDAGIFELGDVPPAAYWNAGSCWTDVPDPNVYLP

SEQ ID NO: 423 - DNA, 1356 bp, Oryza sativa
  ref <308>: DATABASE ACCESSION NUMBER: LOC_Os06g51260
atggcttccatgccgcagctggaggaaaaggattcatccgatttggcaatcaacaaaggcccgtcgctggatcttgtcaaatctcccttgatgatgaatgatgcatctgcaactgtaactgcaatgcagcccaacgaggggatggaggagttccctgtcaaggttcggaagccttacacgatcaccaagcagcgggagaagtggacggaagaagagcacgacaagttccttgaggcattgaagctgtatggtcgctcttggcgtcagatacaagagcacattggcacaaagactgctgtccaaattcggagccatgcccagaagtttttctcaaaggtggtgcgtgagcccggttccaataatgcgattgagatccctccacctaggccaaagagaaaaccacttcatccgtaccctcgaaagtgtgcgaattctggatcggacgcaaatccagcaacagcgcaattgaagcttgctcctggctcatcttcatctggctctgatcaagagaatggttctcctatatcggtgctatctgcgatgcagtcagatgcttttggatcgtcagtatccaatccatcaaccagatgtacctccccagcgtcatctgacgatggaaataacattcccacattcacgagtggggaagataataatgtgccttgtgaaccaacagtgatagatccgtcccagtcccacaaggaaatagaccaagatagaaaagacgtgaataatatgtctgaagaggattcttcagaagaagaggtgcaagaaacaagcttgaagctatttgggaggacagttgtcatcccagatccaaggaagagaagctcctcagatccgaagcatgaaagtgaggagcagatatcacagccttccaatgaagaaatgttgcaggcttcttcatcggttggggagattccagcggcatattgtgcaccaaatggttggtttatgtcatacaattctttcccattccaattcggtgaatcagcggcagatgctagaattccccctttacacgtgtggtggccttactacggttttgctcccattagccatcctagaggactaagcacagtgatgcagcagactgaaggtagtgacgagagtgacggtgtgaagagccactcatccgaatcaagttcggactccggggaaaatgtgcagatgaccgctccccagagctcgagaatagtggaatcacttggagcgatttacgtccgagactcaggttcaagttttgagctaaaaccgagcgcaaattcagcgtttgtaagagtgaagccaagcaacagcggagatgaagaggtaataaggggatttgtgccttataaaagatgcaaatttcaataa

SEQ ID NO: 424 - protein, 451 aa, Oryza sativa
  ref <308>: DATABASE ACCESSION NUMBER: LOC_Os06g51260
MASMPQLEEKDSSDLAINKGPSLDLVKSPLMMNDASATVTAMQPNEGMEEFPVKVRKPYTITKQREKWTEEEHDKFLEALKLYGRSWRQIQEHIGTKTAVQIRSHAQKFFSKVVREPGSNNAIEIPPPRPKRKPLHPYPRKCANSGSDANPATAQLKLAPGSSSSGSDQENGSPISVLSAMQSDAFGSSVSNPSTRCTSPASSDDGNNIPTFTSGEDNNVPCEPTVIDPSQSHKEIDQDRKDVNNMSEEDSSEEEVQETSLKLFGRTVVIPDPRKRSSSDPKHESEEQISQPSNEEMLQASSSVGEIPAAYCAPNGWFMSYNSFPFQFGESAADARIPPLHVWWPYYGFAPISHPRGLSTVMQQTEGSDESDGVKSHSSESSSDSGENVQMTAPQSSRIVESLGAIYVRDSGSSFELKPSANSAFVRVKPSNSGDEEVIRGFVPYKRCKFQ

SEQ ID NO: 425 - DNA, 1152 bp, Oryza sativa
  ref <308>: DATABASE ACCESSION NUMBER: LOC_Os08g04840
atgacgcgtgacggcgcgctgccggcgagcggcggcggcggggcggcggaggggccgaggcggtgctcgcagtgcgggcaccacgggcacaacgcgcggacgtgcacggcgaggggccccgtgaagctgttcggcgtgcggatcggcgacaagccgccgaccgcggccgcgggcggaggaggagggatgaggaagagcgccagtatggggagcctcgcgcagctggcggaggggggcggcggcggcggcgggagggaggaggggtacggctccgatgggaacgacgacaaacggcggaagcgaggtgaggcatggtcagaagaggagcacaaaaagtttctacttgggcttagtaagttaggaaaaggtgattggcgcggcatatcacgcaattatgttggttcaaggacgcctactcaagttgctagccatgctcaaaagtacttcattcgccaaacaaatgtgcacaggagaaaaagaagatcaagccttttcgatatggttatagatgattctgatgaccaaccactgtcccgtacatcttcacaagaagtagaagtagaagagaatctagaagatggacatcctgttactgcaccagtgatcccacctgctcctgtgcctatgctatcatcctctttggttccgccaccagtaccagcaatggcaccagttgctccaggtcctgtgttaacatctgcttcggccacactaccagtgtcagcagtggcaccccaaaccgatgaaaaggaacaagttgcctcaggttcaaatacaacagagacaggggctgcaattccagaagtcatgcccccatatggttatccaatgatgcttcctccatactacccaccggcatttgttccaatgccctactatggttatgtgcctgttttctatgcaccaccaggagcagtgcaagcacaacatgaggttgtcaagcctgtggccgtgcactcaaaacctccagtgcacatcgatgaactctacagcatgtccgaactcagcctgaagggcgaggctggtgtgaaaaacggcactcctaattctctgttgcctccaagaccaattggtagaccagacaggcaatctgcttttcatggaaaaggaccttctgatggctcttcaaatggactgattcctgcaaagtga

SEQ ID NO: 426 - protein, 383 aa, Oryza sativa
  ref <308>: DATABASE ACCESSION NUMBER: LOC_Os08g04840
MTRDGALPASGGGGAAEGPRRCSQCGHHGHNARTCTARGPVKLFGVRIGDKPPTAAAGGGGGMRKSASMGSLAQLAEGGGGGGGREEGYGSDGNDDKRRKRGEAWSEEEHKKFLLGLSKLGKGDWRGISRNYVGSRTPTQVASHAQKYFIRQTNVHRRKRRSSLFDMVIDDSDDQPLSRTSSQEVEVEENLEDGHPVTAPVIPPAPVPMLSSSLVPPPVPAMAPVAPGPVLTSASATLPVSAVAPQTDEKEQVASGSNTTETGAAIPEVMPPYGYPMMLPPYYPPAFVPMPYYGYVPVFYAPPGAVQAQHEVVKPVAVHSKPPVHIDELYSMSELSLKGEAGVKNGTPNSLLPPRPIGRPDRQSAFHGKGPSDGSSNGLIPAK

SEQ ID NO: 427 - DNA, 1608 bp, Oryza sativa
  ref <308>: DATABASE ACCESSION NUMBER: LOC_Os03g09280
atgtcaatgcaggcctctaaccgaccatacagatatccagacaattctcaaataccatactacagccggagttcaatgcatgtggggcaaaatggtacttaccatgtgcaacaaaatcatgaggatctttacgcgtcatctgatgatggttcacagaacggcaattctaaggctcaggggttgcaagcacagtactgcactctagattcatcctcaggcaattttgtgtatccagcacatagctctacatcctcccacataagtgggagccccatttctcagcaagatagccactcagagcacacatctggttcccctgcaagtgcttcatgtgttactgaagttccaggcttgaggtttacaacaattgaggagatagagaatgcaatgtttggacctgaacctgacacagttagctcggactgctccttacttactgattctgctttttaccaagataactggagggagcatctgggaatcaatacaggggacttgaagcaggtaattgcagcatgcggtaaggctgttgatgagaatagttggtatagggacttgctgatatctgagttaaggaacatggtttccatttctggagagccgatgcaacgccttggagcctatatgttggaaggccttgttgccaggctttcttcgactgggcatgccttatataaatccctgaagtgtaaagaacctactagcttcgagctcatgtcttatatgcatctcctctatgagatatgcccgtttttcaagtttggttacatgtctgccaatggagcaattgcagaggctgttaagggcgagaactttgttcacatcatcgacttccaaattgctcaaggtagccagtgggcaactatgatacaggcccttgctgcaaggcctgggggaccaccatacctgaggattactggtatagatgactcgaattctgcccatgcccgaggtggtggactggatatagtcggacggcggttattcaatattgcccagtcatgtggtctgccctttgagttcaatgctgtcccagcagctagtcatgaggttatgcttgaacatcttgatataagatctggggaggttattgttgttaattttgcctaccagctgcatcacactcctgatgagagtgtgggcatagaaaatcaccgggacaggatattgagaatggtcaaggggctctctccaagggtggtaactcttgtagaacaggaagcaaacacaaacactgcacctttcttcaatagatacttggaaactcttgattattacacagctatgtttgaagctatagatgttgcttgcccaagggatgacaagaagcggattagcactgagcaacactgtgttgcaagagatattgttaatttgattgcatgtgaaggtgcagaaagggtggagaggcacgagccttttggaaaatggagggcaaggctttcaatggctggctttaggccgtacccactaagtgcactggtgaacaacactatcaaaaagttgctggatagttaccacagttactacaagctagaggagagagatggtgccctttatcttggatggaagaacagaaagctggttgtatcttctgcatggcggtga

SEQ ID NO: 428 - protein, 535 aa, Oryza sativa
  ref <308>: DATABASE ACCESSION NUMBER: LOC_Os03g09280
MSMQASNRPYRYPDNSQIPYYSRSSMHVGQNGTYHVQQNHEDLYASSDDGSQNGNSKAQGLQAQYCTLDSSSGNFVYPAHSSTSSHISGSPISQQDSHSEHTSGSPASASCVTEVPGLRFTTIEEIENAMFGPEPDTVSSDCSLLTDSAFYQDNWREHLGINTGDLKQVIAACGKAVDENSWYRDLLISELRNMVSISGEPMQRLGAYMLEGLVARLSSTGHALYKSLKCKEPTSFELMSYMHLLYEICPFFKFGYMSANGAIAEAVKGENFVHIIDFQIAQGSQWATMIQALAARPGGPPYLRITGIDDSNSAHARGGGLDIVGRRLFNIAQSCGLPFEFNAVPAASHEVMLEHLDIRSGEVIVVNFAYQLHHTPDESVGIENHRDRILRMVKGLSPRVVTLVEQEANTNTAPFFNRYLETLDYYTAMFEAIDVACPRDDKKRISTEQHCVARDIVNLIACEGAERVERHEPFGKWRARLSMAGFRPYPLSALVNNTIKKLLDSYHSYYKLEERDGALYLGWKNRKLVVSSAWR

SEQ ID NO: 429 - DNA, 1437 bp, Oryza sativa
  ref <308>: DATABASE ACCESSION NUMBER: LOC_Os06g09370
atggactactctgctggttcctacatgtggcctggcaattcaggttctgagaactataattttgttgacggttcgtcggaatcatatgcagaagaaggaagcctaccaccttcaggctatttcatgggagctggatcagatcgcagtttaaagatcacggagaatgaaaggaaccccactatgcttgcaaatggatgcttgccatacaacacccaggctcatccattatctggccagattctacctaagggtgagctccctaacaatcttctggatcttcaacagctacagaacagcagcaatctgcgaagcaattcaattcccccaggggttcttcagtgcaattcaacatctggaacatttgatgcgaaattggatacacctggtcttgcagaactgcctcatgctttgtccagttcaattgatagcaatggtagtgacatttctgcttttcttgctgatgtgcatgccgtttcttcagccccgacgttgtgttcagcattccaaaacgtttcctccttcatggaaccagtaaatctagatgctttcggtttccaaggggcacaaaatgttgctatgttgaacaaaacaagtcttccaaatgggaatccctcgctgtttgataatgctgccatagcatcactacatgatagcaaagagtttctcaatggtggttccatcccttcgtttggtactgtcctgcaggcactaggagcgggtggtttgaaggctgctcaacaggagcaaaatatccggaatatacctctccctacattcacatctggtagtcatttggcagttactgatgcacaagggccaccacttccttcaaagataccaccattgatccatgaccataatagtgagtaccctattaaccattcttctgatgtggaaccccaagcaaattcagctcctggaaatagtgccaatgcgaagccacgtacaagggctcgccgtggacaggcaactgatcctcacagtattgctgaacggcttcgccgagagaaaatttcagaaaggatgaaaaatctccaagtccttgtcccaaactccaataaggcagataaggcatcaatgcttgatgaaataattgattatgtgaaatttcttcagcttcaggtcaaggtattgagcatgagcaggctaggagctcctggagcagttcttccccttcttagggaatctcaaaccgagtgccatagtaatccatctctatcagcttcaaccatttcacaagggccaccagacatgccagactcagaagacagctctgcctttgagcaagaggtagtgaagctgatggaaacgagcatcatcagcgcgatgcagtatcttcagaacaagggtctctgcctgatgcccattgctctcgcttcggccatatccaaccagaaaggcatggctgctgctgctgcaatccctcctgaaaaatga

SEQ ID NO: 430 - protein, 478 aa, Oryza sativa
  ref <308>: DATABASE ACCESSION NUMBER: LOC_Os06g09370
MDYSAGSYMWPGNSGSENYNFVDGSSESYAEEGSLPPSGYFMGAGSDRSLKITENERNPTMLANGCLPYNTQAHPLSGQILPKGELPNNLLDLQQLQNSSNLRSNSIPPGVLQCNSTSGTFDAKLDTPGLAELPHALSSSIDSNGSDISAFLADVHAVSSAPTLCSAFQNVSSFMEPVNLDAFGFQGAQNVAMLNKTSLPNGNPSLFDNAAIASLHDSKEFLNGGSIPSFGTVLQALGAGGLKAAQQEQNIRNIPLPTFTSGSHLAVTDAQGPPLPSKIPPLIHDHNSEYPINHSSDVEPQANSAPGNSANAKPRTRARRGQATDPHSIAERLRREKISERMKNLQVLVPNSNKADKASMLDEIIDYVKFLQLQVKVLSMSRLGAPGAVLPLLRESQTECHSNPSLSASTISQGPPDMPDSEDSSAFEQEVVKLMETSIISAMQYLQNKGLCLMPIALASAISNQKGMAAAAAIPPEK

SEQ ID NO: 431 - DNA, 888 bp, Oryza sativa
  ref <308>: DATABASE ACCESSION NUMBER: LOC_Os06g45140
atgatgaagaagtgcccgtcggagctgcagctggaggcgttcatccgggaggaggccggcgccggcgaccgcaagcccggcgtgttatctcccggcgacggcgcgcgtaagtccggcctgttctctcccggcgacggcgagatgtccgtgttggatcagagtacactggacggaagcggcggcggccaccagctgtggtggccggagagcgtccgtacgccgccgcgcgccgccgccgccttctcggccacggccgacgagcggacgccggcgtccatctccgatgaccccaaaccaaccacctcagcgaaccacgcgcctgaaagcgactcggactccgattgcgattcgctgttagaagcagagaggagtccacgcctgcgtggcacgaaatccacagaaacaaagcgaataagaaggatggtgtccaacagggagtccgctcgacgatccaggaggagaaagcaggcacagttatctgaactcgaatcacaggtcgagcaactcaaaggcgaaaactcatccctcttcaagcagctcacagagtccagccagcagttcaatacagcggtcacggacaacaggatcctcaaatcggatgtagaggccttaagagtcaaggtcaagatggctgaagacatggtcgcgagggccgcgatgtcgtgtggcctgggccagctcgggctggcgccattgctcagctccaggaagatgtgccaagctttggatatgctcagtttaccacggaacgatgcctgtggtttcaaaggcttgaacctgggtcgacaggttcagaactcaccggttcaaagcgctgcaagcctagagagcctggacaaccggatatccagcgaggtgaccagctgctcggctgatgtgtggccttaa

SEQ ID NO: 432 - protein, 295 aa, Oryza sativa
  ref <308>: DATABASE ACCESSION NUMBER: LOC_Os06g45140
MMKKCPSELQLEAFIREEAGAGDRKPGVLSPGDGARKSGLFSPGDGEMSVLDQSTLDGSGGGHQLWWPESVRTPPRAAAAFSATADERTPASISDDPKPTTSANHAPESDSDSDCDSLLEAERSPRLRGTKSTETKRIRRMVSNRESARRSRRRKQAQLSELESQVEQLKGENSSLFKQLTESSQQFNTAVTDNRILKSDVEALRVKVKMAEDMVARAAMSCGLGQLGLAPLLSSRKMCQALDMLSLPRNDACGFKGLNLGRQVQNSPVQSAASLESLDNRISSEVTSCSADVWP

SEQ ID NO: 433 - DNA, 1011 bp, Oryza sativa
  ref <308>: DATABASE ACCESSION NUMBER: LOC_Os10g41460
atgtcgtcctcctcctccccgccgcccaacccggacgcgctctcctccccggacctccccccgctggccgcccccgcggcggcggccgcggcagccgccgccgcggtgtcatctggtggcgcggggggctccgggcggaggctgcccccgccgtgctggacgcacgaggagacgctggcgctcatcgaggcctaccgcgataggtgggaggggctccgcaaggggaacctcagagcctccgactgggacgacgtcgccggcgccgtcaccgcccgctgcgggaggttccccacggcgacgcacaagtccggcgtccagtgccgccacaagatcgagaagctccggaagcggtaccgcgccgagagggcgcgcgccgccggccgctccaagggccccaagtggcccttcttcccgctcctccacgacctcgccggcggcggggcgcccgaccctagccccaaccccatcatcaagatcaaatccaagggccccgccgccgcggccgcctccccctcaccggcgtccccttctcccgtctcctccccttcctccgaggaggatgaggaggaggaggcggcggcggacgcggggcggagcaggagccttcacggcctcatctccaacggcgggagcgggagcggcctgcgcttcaccatccccaaggcctcccgctccaagcctgtggcgcagcgagaacaacccaccgccatcaaggtggagaagagcgaggaggacgccgaggcggaggccatggccgaggtggcctcggcgctgcgcgccgtcggcgacaagttcctccgcatggaggagcggaggctggagatctctctccagatagagaaggagcggatggagtctgagatgaagcgcacccagacgctgctcgacgcccagcagctgttcgtcgaggccttcctcggcaagcagcagcaccaccaccaccaccacaagaaggccaaggtgatctccgccgccgctgccgcagcaacagccgccatggatgaggattga

SEQ ID NO: 434 - protein, 336 aa, Oryza sativa
  ref <308>: DATABASE ACCESSION NUMBER: LOC_Os10g41460
MSSSSSPPPNPDALSSPDLPPLAAPAAAAAAAAAAVSSGGAGGSGRRLPPPCWTHEETLALIEAYRDRWEGLRKGNLRASDWDDVAGAVTARCGRFPTATHKSGVQCRHKIEKLRKRYRAERARAAGRSKGPKWPFFPLLHDLAGGGAPDPSPNPIIKIKSKGPAAAAASPSPASPSPVSSPSSEEDEEEEAAADAGRSRSLHGLISNGGSGSGLRFTIPKASRSKPVAQREQPTAIKVEKSEEDAEAEAMAEVASALRAVGDKFLRMEERRLEISLQIEKERMESEMKRTQTLLDAQQLFVEAFLGKQQHHHHHHKKAKVISAAAAAATAAMDED

SEQ ID NO: 435 - DNA, 1515 bp, Oryza sativa
  ref <308>: DATABASE ACCESSION NUMBER: LOC_Os09g29930
atgggcatccaagggaacaaggcgacgacgcgcgagcacgacttcctctcgctgtacaccaccgccgctaaggatccgtctctccagctccacgacgccaagccgccgcctccttcccaaggtttcttcctgaggacgcacgacttcctgcagccgctggagaagccgacgccggcgccgacgccgcctccgacgagccagctgcagcagcagcagcagcaagcgttccccggcggcatcggaacgttcagcatcagccacgtcgccggcgcacgcccggtcgcggctgccgtcgtcaaggccgagccgacgccgttcgttctctggggccagcccgccgccgccgccgccgcgcacccggtcgccgcactagggcaccaccaccaccaccaccagtggacgctccccttcgccggcgtcgggcaggtggccgccaccgcggcgaggcagcagcaggagtggaaggggcgagtcgggggaggcgggttcatggactctggctccagatccagtggcggcgccgggttcgacgacgacgatggcgtggccgcgcggcgtgaggtctcgtcctcgctcaaagagttgacagtgagggtggatgggaagggtgggagctgcagtggaagtggtactgatcagcggcccagctcaccacgttcaaagcactctgctaccgagcagcgtcggcgcagcaagatcaatgacaggtttcagatacttagggagctgttacctcatagcgaccaaaagagagacaaagcaacatttctgttagaggttattgaatacatacgctttttgcaagagaaagtgcagaagtttgaagcttcagtccctgaatggaaccaagaaaatgcaaagatacttccatggtcaaacatatattttagatcgttctggaaaaattcacaaagtaaaggtcagaaccctggagatgatttgcctgatccttcacagttcatccggaatgggtcctcttctgggtataatttcactggcaaacctgatgataaccacaacatggtgacatcagcagctgcctcaggggcacaagaactggtggaaactgaccatgcagctagcgtgtcctacagatcagcagaaactccgacaaacattaccaacaatgttacatcccaagcccaagcccagtgggctagtccggctggtgtggatgactgtgcaatgaacagcgaaatgttaaataaccaacagttggcaattgatgaaggaacaataagcttgtcaagccaatattcccaacagctacttggtacgttgactcatgcccttgaaagctcaggtgttgatctgtcccaatccagcatatctgtgcagatcaaccttggcaagcgagctgttaagagacctggtgctgatggatcctccagttctaaggagctccccagtacatcagcgaacaacgaaaacatgggtcaccagctgacgatgttagggggtggtactgaagaacttccacacccaacgaagcgccataaatcgggcaacagctga

SEQ ID NO: 436 - protein, 504 aa, Oryza sativa
  ref <308>: DATABASE ACCESSION NUMBER: LOC_Os09g29930
MGIQGNKATTREHDFLSLYTTAAKDPSLQLHDAKPPPPSQGFFLRTHDFLQPLEKPTPAPTPPPTSQLQQQQQQAFPGGIGTFSISHVAGARPVAAAVVKAEPTPFVLWGQPAAAAAAHPVAALGHHHHHHQWTLPFAGVGQVAATAARQQQEWKGRVGGGGFMDSGSRSSGGAGFDDDDGVAARREVSSSLKELTVRVDGKGGSCSGSGTDQRPSSPRSKHSATEQRRRSKINDRFQILRELLPHSDQKRDKATFLLEVIEYIRFLQEKVQKFEASVPEWNQENAKILPWSNIYFRSFWKNSQSKGQNPGDDLPDPSQFIRNGSSSGYNFTGKPDDNHNMVTSAAASGAQELVETDHAASVSYRSAETPTNITNNVTSQAQAQWASPAGVDDCAMNSEMLNNQQLAIDEGTISLSSQYSQQLLGTLTHALESSGVDLSQSSISVQINLGKRAVKRPGADGSSSSKELPSTSANNENMGHQLTMLGGGTEELPHPTKRHKSGNS

SEQ ID NO: 437 - DNA, 879 bp, Oryza sativa
  ref <308>: DATABASE ACCESSION NUMBER: LOC_Os03g12860
atggctcaggaggacgtcggtcacctgagcgacgccggcctggcgctgggcctgtccctcggcgggggaggaggagggacgaccgacgcggcggcggcgcaccgtggcggctgccggcggccgtcgccgtcgtcgcagtgcccgccgctggagccgtcgctgaccctgagcttgcccgacgacgcggcggccggcgcggccgcgaccgcgaccgcgaccgcgtccggcgggggcggccctgcgcacagcgtgtcgtcgctgtccgtcggcgcggcggcggcggcggccgtgaagagggagcgcgcggaggaggccgacggcgagagggtgtcgtcgacggcggccgggcgtgacgacgacgacgacgggagcacccgcaagaagctccggctgaccaaggagcagtccgcgctcctggaggaccgcttccgggagcacagcacgctcaacccgaagcagaaagtcgctttagcgaagcaactgaacctcaggccaaggcaggtggaggtctggttccaaaacagaagagcaaggacaaagctgaagcagacggaggtggactgcgagttcctgaagcgctgctgcgagacgctcaccgaggagaaccgtcggctgcagcgcgagctgcaggagctccgcgcgctcaagttcgccccgccgccgccgtcctcggcggcccaccagccgtcgccggcgccaccggcgccgttctacatgcaactcccggccgccacgctcaccatctgcccgtcctgcgagcgcgtcggcgggcccgcgtccgccgccaaggtcgtcgccgccgacgggaccaaggccggccccggccggaccaccacccaccacttcttcaaccccttcacccactccgccgcctgctga

SEQ ID NO: 438 - protein, 292 aa, Oryza sativa
  ref <308>: DATABASE ACCESSION NUMBER: LOC_Os03g12860
MAQEDVGHLSDAGLALGLSLGGGGGGTTDAAAAHRGGCRRPSPSSQCPPLEPSLTLSLPDDAAAGAAATATATASGGGGPAHSVSSLSVGAAAAAAVKRERAEEADGERVSSTAAGRDDDDDGSTRKKLRLTKEQSALLEDRFREHSTLNPKQKVALAKQLNLRPRQVEVWFQNRRARTKLKQTEVDCEFLKRCCETLTEENRRLQRELQELRALKFAPPPPSSAAHQPSPAPPAPFYMQLPAATLTICPSCERVGGPASAAKVVAADGTKAGPGRTTTHHFFNPFTHSAAC

SEQ ID NO: 439 - DNA, 657 bp, Oryza sativa
  ref <308>: DATABASE ACCESSION NUMBER: LOC_Os07g08880
atggcgaagtcgcggccgcccaagcggatcctcgagtcctacaccatcaagggctccgacaaagtcatcaagcctggggactgtgtgctaatgagggcatctgatacatcaaagccaccctatgtggcaagagttgaggctattgaggctgcagggtcacgaggcacaaatgtgagagtacgggtgcggtggtactatcggccagaggagtccatgggtggaaggcgtccatttcatggtgccaaagaggtgttcctctcggatcactatgacgtacagagtgctgacaccatagagggaaagtgcaacgttcacagcttccgtagctacacaaagcttgattctgtcaatgctgaggacttcttctgtcgctttgagtacaaatcagccacaggaagcttcgtgcccgaccgcattgctgtgttctgcaagtgtgagatgccatacaatcctgatgaccttatgatccaatgtgaggaatgctctgattggtttcacccttcttgcattggaatgactattaaagatgcaaaaaaactagagcattttttctgccagagctgtactgcggaaaatggaaagatggctgagaattctcatgaagctacagcgcaatccgaagaaaagcaggtggagtcaaaaagacggagaaggtga

SEQ ID NO: 440 - protein, 218 aa, Oryza sativa
  ref <308>: DATABASE ACCESSION NUMBER: LOC_Os07g08880
MAKSRPPKRILESYTIKGSDKVIKPGDCVLMRASDTSKPPYVARVEAIEAAGSRGTNVRVRVRWYYRPEESMGGRRPFHGAKEVFLSDHYDVQSADTIEGKCNVHSFRSYTKLDSVNAEDFFCRFEYKSATGSFVPDRIAVFCKCEMPYNPDDLMIQCEECSDWFHPSCIGMTIKDAKKLEHFFCQSCTAENGKMAENSHEATAQSEEKQVESKRRRR

SEQ ID NO: 441 - DNA, 846 bp, Oryza sativa
  ref <308>: DATABASE ACCESSION NUMBER: LOC_Os01g69980
atggaccccaaattccccccacccccaccgctaaacaaaacggagcccaccaccaccaccaccaaccagcagcatcaccacgatgagcagcagcagcagcatcgcctccagattcaagttcatcctcagcagcaggagcagcaggatggaggtggaggaggagggaaggatcagcagcagcagcagcagatgcaggtggtggttgcggcggcggcgggggagaggaggatgcaggggctagggccgaagcggagctcgaacaaggaccgccacaccaaggtggacgggcgggggcggcggatccggatgccggcgctgtgcgccgcccggatcttccagctcacgcgggagctcggccacaagtccgacggcgagaccgtccagtggctgctccagcaggcggagccggccatcgtcgccgccacggggaccgggaccatcccggcgtccgcgctcgcctccgtcgccccctccctcccttcccccaactccgccctctccaggtcgcaccaccaccaccaccacatgtgggcggcagcgccgcccacggcgtccgccgggttcgccggtgcagggttctccggcgccgactccggggtgatcggcgggatcatgcagcggatggggatccccgccgggatcgagctccagggcgggggagcgggggggttggggggtgggggtggcggcggcggtggccacatcgggttcgcgcccatgttcgccagccacgcggcggcggcggcggccatgccggggctagagctagggctctcgcaggacggccacatcggcgtgctcgccgcgcagtcgctcagccagttctaccaccaggtcgttgtgtag

SEQ ID NO: 442 - protein, 281 aa, Oryza sativa
  ref <308>: DATABASE ACCESSION NUMBER: LOC_Os01g69980
MDPKFPPPPPLNKTEPTTTTTNQQHHHDEQQQQHRLQIQVHPQQQEQQDGGGGGGKDQQQQQQMQVVVAAAAGERRMQGLGPKRSSNKDRHTKVDGRGRRIRMPALCAARIFQLTRELGHKSDGETVQWLLQQAEPAIVAATGTGTIPASALASVAPSLPSPNSALSRSHHHHHHMWAAAPPTASAGFAGAGFSGADSGVIGGIMQRMGIPAGIELQGGGAGGLGGGGGGGGGHIGFAPMFASHAAAAAAMPGLELGLSQDGHIGVLAAQSLSQFYHQVVV

SEQ ID NO: 443 - DNA, 1044 bp, Oryza sativa
  ref <308>: DATABASE ACCESSION NUMBER: LOC_Os02g03580
atgggtactaatgatcctggcacgccgtccaaggcaacaaaggcatcagaaccggagcagtctccagccactacatctggcactacagctccagtttaccctgaatggcctggttttcaggcctactcggcaattccaccgcatgggttctttccacctcctgttgctgcaagtccccaggctcatccctacatgtggggagctcagcccatggtgccaccttacgggacaccaccaccttatatgatgtatcctccaggaactgtatatgcacatccctctactcctggtgtgcatccatttaatcactaccctatgctggcaaatggaaatgttgaaactgctggaactgcaccaggtgcttcagaaattaacgggaaaaatgagcttggcagaacatctggtccatctgccaacgggattacctcccacagtgagagtggaagtgagagtgaaagtgaaggaagtgatgccaactctcaaaatgattcacattcaaaggaaaatgatgtaaaggaagatggtagttctcagaatggcatatcacatacagcattaaatcagaacatgtcgatggctccaactcaaacgggtgtagtaatcgggggagttgctcccacaacaaacttgaacataggaatggactactggggtgctgctggttcttcgcctgttcctgcaatgcatggcaaagcatcgtctggttcagttcgaggagagcaatgggatgaaagagagctcaagaagcagaaaaggaagcagtctaatcgggaatcagcacgtagatcccggctgcgcaagcaggctgagtgtgaagagctttctgtacgcgctgacaatttaagggcagaaaactcctctcttagggctgagcttgaacggatcaaaaaggagtacgaggcacttctttcacacaatgcttcactcaaggaaaaactagaggggaacagtgattcaataccttatatgaatgaacagaacgacaccaatggcacccaccagaagcaacaggattctgatgctcagcctaatgatgcgccttga

SEQ ID NO: 444 - protein, 347 aa, Oryza sativa
  ref <308>: DATABASE ACCESSION NUMBER: LOC_Os02g03580
MGTNDPGTPSKATKASEPEQSPATTSGTTAPVYPEWPGFQAYSAIPPHGFFPPPVAASPQAHPYMWGAQPMVPPYGTPPPYMMYPPGTVYAHPSTPGVHPFNHYPMLANGNVETAGTAPGASEINGKNELGRTSGPSANGITSHSESGSESESEGSDANSQNDSHSKENDVKEDGSSQNGISHTALNQNMSMAPTQTGVVIGGVAPTTNLNIGMDYWGAAGSSPVPAMHGKASSGSVRGEQWDERELKKQKRKQSNRESARRSRLRKQAECEELSVRADNLRAENSSLRAELERIKKEYEALLSHNASLKEKLEGNSDSIPYMNEQNDTNGTHQKQQDSDAQPNDAP

SEQ ID NO: 445 - DNA, 618 bp, Oryza sativa
  ref <308>: DATABASE ACCESSION NUMBER: LOC_Os08g38780
atggagcccaaatccaccacccctcctccgcctcctccgccccccgtgctgggcgcccccgtcccttacccgccggcgggagcctaccccccacccgtcgggccctacgcccacgcgccgccgctctacgccccgcctccccccgccgccgccgccgcctccgccgccgccaccgccgcctcgcagcaggccgccgccgcgcagctccagaacttctgggcggagcagtaccgcgagatcgagcacaccaccgacttcaagaaccacaacctccccctcgcccgcatcaagaagatcatgaaggccgacgaggacgtccgcatgatcgccgccgaggcccccgtcgtgttcgccagggcgtgcgagatgttcatcctcgagctcacccaccgcggctgggcgcacgccgaggagaacaagcgccgcacgctccagaagtccgacatcgccgccgccatcgcccgcaccgaggtcttcgacttcctcgtcgacatcgtgccccgcgacgaggccaaggacgccgaggccgccgccgccgttgccgccgggatcccccaccccgccgccggtttgcccgccaccgaccccatggcctactactatgtccagccgcagtaa

SEQ ID NO: 446 - protein, 205 aa, Oryza sativa
  ref <308>: DATABASE ACCESSION NUMBER: LOC_Os08g38780
MEPKSTTPPPPPPPPVLGAPVPYPPAGAYPPPVGPYAHAPPLYAPPPPAAAAASAAATAASQQAAAAQLQNFWAEQYREIEHTTDFKNHNLPLARIKKIMKADEDVRMIAAEAPVVFARACEMFILELTHRGWAHAEENKRRTLQKSDIAAAIARTEVFDFLVDIVPRDEAKDAEAAAAVAAGIPHPAAGLPATDPMAYYYVQPQ

SEQ ID NO: 447 - DNA, 1521 bp, Oryza sativa
  ref <308>: DATABASE ACCESSION NUMBER: LOC_Os03g63750
atggaggccgccgttgctgctgcggctgcggccgccggggcggtgacgacggcggtcgcgcctccgcccggcgcggcggtcagcaacggggtggcgaccgcgccgccgccgttcctgatgaagacgtacgagatggtggacgacccggccaccgatgccgtcgtctcatggggccccgggaacaacagcttcgttgtgtggaacacccccgagttcgcgcgcgacctcctccccaagtacttcaagcacagcaacttctcctccttcgtcaggcagctcaacacctacggatttaggaaagttgatccagataggtgggagtttgcaaacgaaggttttcttagaggacaaaagcatctactgaagaccatcaacagaaggaaaccaactcatggaaacaaccaagttcagcagcctcagttgccagctgctcctgtacctgcttgcgtagaagtggggaagtttgggatggaagaagagattgagatgctcaaaagggataaaaatgttttaatgcaggaacttgtcaggctgagacaacaacagcagacaacagatcatcagctgcagactttgggcaagcgtcttcaaggaatggagcaacggcaacaacaaatgatgtctttcctggctaaggcaatgcatagtcctggcttcctagcacaatttgtacagcaaaacgaaaacagcagaagaagaatagttgctagtaacaaaaagaggaggctaccaaagcaggatggttcgttggactctgaaagtgcttcattggatggacaaatagtaaaatatcaacctatgatcaatgaagcagccaaagcgatgctaaggaagatcctaaagctagattcttcacatagatttgaatccatgggcaattcagataatttccttcttgagaattatatgccaaatggtcaaggtcttgacagctcttcatcaactcggaattctggtgttacccttgcagaggtcccagctaactcaggtttgccatatgtagctacaagctctggactttcagctatttgttcaacttcgactcctcagattcagtgcccagttgttttggacaacggcatacccaaagaagttccaaacatgagtgcggtgccttctgttccgaaggctgtggctccaggcccaactgatatcaatattctggaattcccagatttgcaagatatagtagctgaagaaaatgttgatattcctggagggggctttgaaatgcctggtcctgagggtgtattctctttgcctgaagaaggtgatgatagtgttcccattgagactgatgagattttgtacaacgatgacacccagaaacttcctgctatcattgattctttctgggaacagttcctggtggctagccctctatctgttgataatgatgaagtcgattcaggtgtactagaccaaaaggaaacacaacaggggaatggatggaccaaagctgaaaacatggctaaccttacagaacagatgggcctcctgtcatcacaccatacaggatga

SEQ ID NO: 448 - protein, 506 aa, Oryza sativa
  ref <308>: DATABASE ACCESSION NUMBER: LOC_Os03g63750
MEAAVAAAAAAAGAVTTAVAPPPGAAVSNGVATAPPPFLMKTYEMVDDPATDAVVSWGPGNNSFVVWNTPEFARDLLPKYFKHSNFSSFVRQLNTYGFRKVDPDRWEFANEGFLRGQKHLLKTINRRKPTHGNNQVQQPQLPAAPVPACVEVGKFGMEEEIEMLKRDKNVLMQELVRLRQQQQTTDHQLQTLGKRLQGMEQRQQQMMSFLAKAMHSPGFLAQFVQQNENSRRRIVASNKKRRLPKQDGSLDSESASLDGQIVKYQPMINEAAKAMLRKILKLDSSHRFESMGNSDNFLLENYMPNGQGLDSSSSTRNSGVTLAEVPANSGLPYVATSSGLSAICSTSTPQIQCPVVLDNGIPKEVPNMSAVPSVPKAVAPGPTDINILEFPDLQDIVAEENVDIPGGGFEMPGPEGVFSLPEEGDDSVPIETDEILYNDDTQKLPAIIDSFWEQFLVASPLSVDNDEVDSGVLDQKETQQGNGWTKAENMANLTEQMGLLSSHHTG

SEQ ID NO: 449 - DNA, 1098 bp, Oryza sativa
  ref <308>: DATABASE ACCESSION NUMBER: LOC_Os02g54160
atgtgcggcggcgccatcatccaccacctgaaggggcacccggaggggtcgcgccgggcgacggaggggctcctgtggcccgagaagaagaagcccaggtggggcggcggcgggaggcgccacttcggggggttcgtggaggaggacgacgaggacttcgaggccgacttcgaggagttcgaggtggactccggggactcggatttggagctcggggaggaggacgacgatgacgtcgtcgagatcaagccggccgccttcaagagggccctctccagagataacttgagcaccattaccactgccggatttgatggtcctgctgcaaagtctgccaaaagaaagagaaagaaccaattcaggggcatccgccagcgcccttggggtaagtgggctgctgaaatcagagatcctcgcaagggtgttcgtgtctggcttggcactttcaacagtgctgaagaagctgcaagagcttatgatgctgaagcacgcaggattcgtggcaagaaggccaaggtgaattttccagaggctccaacaactgctcagaagcgtcgtgctggctccaccactgctaaagcacccaagtcaagtgtggaacagaagcctactgtcaaaccagcattcaacaatcttgccaatgcaaatgcgtttgtctacccatctgctaacttcacttcaaacaagccgtttgttcagcctgataacatgccatttgttcctgcaatgaactctgctgctcctattgaggaccctatcatcaactctgaccagggaagcaactcatttggctgctctgactttggctgggagaatgataccaagacaccagatattacatcaattgctcccatttcaaccatagctgaagtcgatgaatctgcattcattaagagcagtaccaacccaatggtccctcctgttatggagaacagtgctgttgatctgcctgatttagaaccctacatgaggttccttctggatgatggtgctggtgactcaattgatagccttctcaacctggatggatcacaggatgttgtcagcaacatggacctctggagctttgatgacatgcccgttagcgatttctattga

SEQ ID NO: 450 - protein, 365 aa, Oryza sativa
  ref <308>: DATABASE ACCESSION NUMBER: LOC_Os02g54160
MCGGAIIHHLKGHPEGSRRATEGLLWPEKKKPRWGGGGRRHFGGFVEEDDEDFEADFEEFEVDSGDSDLELGEEDDDDVVEIKPAAFKRALSRDNLSTITTAGFDGPAAKSAKRKRKNQFRGIRQRPWGKWAAEIRDPRKGVRVWLGTFNSAEEAARAYDAEARRIRGKKAKVNFPEAPTTAQKRRAGSTTAKAPKSSVEQKPTVKPAFNNLANANAFVYPSANFTSNKPFVQPDNMPFVPAMNSAAPIEDPIINSDQGSNSFGCSDFGWENDTKTPDITSIAPISTIAEVDESAFIKSSTNPMVPPVMENSAVDLPDLEPYMRFLLDDGAGDSIDSLLNLDGSQDVVSNMDLWSFDDMPVSDFY

SEQ ID NO: 451 - DNA, 1311 bp, Oryza sativa
  ref <308>: DATABASE ACCESSION NUMBER: LOC_Os09g14540
atgtggtctggggacaaaggagtgatgctgggaacgaagggttcgggtggtggggatgtgggagaatggctactagtgctaggttttggggggtcgatttggaagggtttggttcatgggagattggggaagaggggtggggatctgtgcgctggtgaaattgataagaggctgttggaacttggaagctgtatagttcaggtcgtcatggctcatcaaaagcgtgaagcaaccagcgacaacggcggtggcgatgaagagtgggcatcaaaacgccccaaagttgtcggcgctgctgctgaaaaggagcacattctgacatctgacgcttcgcatgaaacgaatggcgatgaagctcaaggaggagatgcctctcgaaaggaaaacacggtgtcgacaaacccgtgtgtttcagatgagaaagcagcaaccaactcgaatgtttcaagtggccatggggtgattttgactagtgtggaagctgatgctgcagaagacaagggttgcaggcatactatggaagatgcatgggtgctgcttcctgatgctagcatggaatctccgggaaacctgaggtgcgctcatttcgcaatatatgatggacatggtggtcgcctggctgcagagtatgcacagaaacatttgcatcagaatgttattgcagcaggattaccacgtgagttgatggatgttaaagctgcaaagaaggccatcattgaaggttttcgtagaactgatgagtgcttactgcaagaaagtactaaaggaaactggcaagatggtgcaacagctgtctgtgtctgggtcctggggcagacggtggttgttgcaaatgctggagatgctaaagctgtattagctcgttccacatcagctgatggtgaaggtgcagtggatgatgccaaaagtcaactgaaggctattgttttgaccagagaacataaagcaatctttccacaagaacgtgctcgaatccaaaaggctggaggatctgttggccctaatggcagattacaaggtcgcattgaagtatctagagctttgggtgatcgtcagtttaagaaggttgggctgattgctacaccagacgtccactcctttgaagtaacgagaaaagatcattttattattcttgggtgtgatggcttatggggagtatttggaccaggtgatgctgttgaatttgtgcagaatcaattgaaggagacctcgtcagcgactctggcagtgcggcggctcgtgaaggaagctgttcgtgagaggcgttgcaaggacaactgcactgccgtgctgatcgtcttcaagcactag

SEQ ID NO: 452 - protein, 436 aa, Oryza sativa
  ref <308>: DATABASE ACCESSION NUMBER: LOC_Os09g14540
MWSGDKGVMLGTKGSGGGDVGEWLLVLGFGGSIWKGLVHGRLGKRGGDLCAGEIDKRLLELGSCIVQVVMAHQKREATSDNGGGDEEWASKRPKVVGAAAEKEHILTSDASHETNGDEAQGGDASRKENTVSTNPCVSDEKAATNSNVSSGHGVILTSVEADAAEDKGCRHTMEDAWVLLPDASMESPGNLRCAHFAIYDGHGGRLAAEYAQKHLHQNVIAAGLPRELMDVKAAKKAIIEGFRRTDECLLQESTKGNWQDGATAVCVWVLGQTVVVANAGDAKAVLARSTSADGEGAVDDAKSQLKAIVLTREHKAIFPQERARIQKAGGSVGPNGRLQGRIEVSRALGDRQFKKVGLIATPDVHSFEVTRKDHFIILGCDGLWGVFGPGDAVEFVQNQLKETSSATLAVRRLVKEAVRERRCKDNCTAVLIVFKH

SEQ ID NO: 453 - DNA, 1821 bp, Oryza sativa
  ref <308>: DATABASE ACCESSION NUMBER: LOC_Os01g73750
atgcacggcggcgcgtccttcgccgccgccggcgaagacgccggcgacgcggttctcctggagatcaccgacgcgtccttcatcgccggggaagctgacccctcgcctccacctcccgtctccgtcgacgacctcgccggcctagaccccctgccgtacccgaccatctgggttcgcgccgaccgcaccaggcaagccctcgccgcgccctcttctccggattcaccggccaatgagctgcttgctaatcgagagctcctcctacttccgcgccctcctcggcggcagcttcagggtggcttgtttctggctgctgagaatcttctaacagaatgtgaaaggtggttccgcaccatgagctctcaaagttcctcgctattggccccattagatttcttaattgacacctggtactttgctcaagagcatgggattaattatgttcaagatatatgcccaggatatttagctcagaattttgtaggtgcaggttatctccaggaggtgaggatatgcctcttacctttagaatttgcagcaggaacaaagagaaactgggctgagttcggaagcaaagtagagagtaggattcttaatctgctcaaggatagtttgcgaacagtattggatgcaattgctgatgacaacttggagagttaccgtgttcgaattacagaatattctaagatcatgcacttcgttgcacttctcactgatgaagattttgttttgcagaaaatagtgctttctggttgtccacaaataactactgaaatcttgtacatatcagtgctcccccctactaatgtgggtgcctcattgaataaaagttatggatttggttataagaaatcttgtaaccattcgattcaaactctatgcaattccaatcctctggacagcatggatgagtgtaggcatgtaatggcatttagaatgcaagaattgcacctggatgggtgcaaaggtattggttatgccgctatgtctcagctaatgagtaatgtgaatataacaaacttcctatgtttaagggagacaacacttaccgatggcgctctctgcaactttgttggctcttcacttgagtttcttgatatttccgagaccgtggtttccatggtatcattagcaccagttataagaagaaattctaacttgagatgtctgaaagcagctggatgccgtaacttgctatttgaacatggtgaagtagaagcgatgagtggtggtaatatatacggagattttctacaagaaataaccagtacttgctgcttagaggatgttgaaatgggatgggcattttgccctattcgagttacaacccttattccttcttttagtaaagtaagaaagatgactattggacttggcacaacattaccagagaatatattgtgtgctcttcctgatatttgtccattcctagagtctttggttcttaggtttcagatgatctctgacaaagttgtaagaaatctgttgaaatcctcaacgaagcttcgggtgctttgcctgtactcttgtcttggcaatttaacttcatttagcttccaaatcaaggcaccattgctaagaatcttaaggcttgagtggattactccatggatgacaaatgatgacttggcagttcttatacagaactataacttagttgaactttcactgtctggttgcaaactccttgactccaactctcaagagttaatctcgtctgggtggccaaacttgacttgtttacaccttgagtttttatttaagccaaaatttcaaggtttcagtgctgttatatctgtagccaccctcttaaataagtaa

SEQ ID NO: 454 - protein, 606 aa, Oryza sativa
  ref <308>: DATABASE ACCESSION NUMBER: LOC_Os01g73750
MHGGASFAAAGEDAGDAVLLEITDASFIAGEADPSPPPPVSVDDLAGLDPLPYPTIWVRADRTRQALAAPSSPDSPANELLANRELLLLPRPPRRQLQGGLFLAAENLLTECERWFRTMSSQSSSLLAPLDFLIDTWYFAQEHGINYVQDICPGYLAQNFVGAGYLQEVRICLLPLEFAAGTKRNWAEFGSKVESRILNLLKDSLRTVLDAIADDNLESYRVRITEYSKIMHFVALLTDEDFVLQKIVLSGCPQITTEILYISVLPPTNVGASLNKSYGFGYKKSCNHSIQTLCNSNPLDSMDECRHVMAFRMQELHLDGCKGIGYAAMSQLMSNVNITNFLCLRETTLTDGALCNFVGSSLEFLDISETVVSMVSLAPVIRRNSNLRCLKAAGCRNLLFEHGEVEAMSGGNIYGDFLQEITSTCCLEDVEMGWAFCPIRVTTLIPSFSKVRKMTIGLGTTLPENILCALPDICPFLESLVLRFQMISDKVVRNLLKSSTKLRVLCLYSCLGNLTSFSFQIKAPLLRILRLEWITPWMTNDDLAVLIQNYNLVELSLSGCKLLDSNSQELISSGWPNLTCLHLEFLFKPKFQGFSAVISVATLLNK

SEQ ID NO: 455 - DNA, 1089 bp, Oryza sativa
  ref <308>: DATABASE ACCESSION NUMBER: LOC_Os09g38550
atgggggtgtacctgagcacgcccaagacggagaagtactccggcgagggcgggaacgaccgcctccgctacggcctcgcatccatgcagggatggcggacgaccatggaggacgcgcacactgccctgccacgcctggacgaatgcacatccttttttggtgtctatgatggccatggagggaaggcagtatctaagttttgtgcgaaacatctacacttgcaagtactgaaaaatgaggcttattcatctggtgatttggctacttctgtcttaaagtcatttttcagaatggatgagatgatgaaagggcaaagggggtggagggaactggctgaattgggggacaagggacaaaagtttactggcatgttagaaggcataatatggtccccgaaacctggagagtcagataaacctgaggacacttggactgaggagggtcctcattctcattttcctgggccaacatctggaagcactgcttgtgtggctatcataagaaatgatgaactcattgttgcaaatgctggtgattcccggtgtgtgctctcaaggaagggtcgagcttatgacctgtcaaaagatcacaagccagatcttgatgcagaaaaggagaggatactgaatgctggtggtttcattgttgctgggcgggtcaatggaagtttgaacttggcaagggcaataggggatatggaattgaagcagaatgaatttctcccagccgagagacagattgtcactgctgaacctgaattaaacacagttaaactttctgaggatgatgagttcatcgttttagcatgtgatggcatatgggattgcatgtcaagtcaagaagtggtggactttgttcacaaagaaatgaacactgaggatagcctatctgctgtctgcgagaagttgcttgaccattgcttggcacctgtatccggtggtgatggctgtgataatatgacagtgatcatagtcaagttcaagaagccaagcaagtcagctgctacttcaagcacaaatcaatctgtctcttcagaagagatgcgaccaaacgagcttgatgatggcccaagcgatccaaacaagtag

SEQ ID NO: 456 - protein, 362 aa, Oryza sativa
  ref <308>: DATABASE ACCESSION NUMBER: LOC_Os09g38550
MGVYLSTPKTEKYSGEGGNDRLRYGLASMQGWRTTMEDAHTALPRLDECTSFFGVYDGHGGKAVSKFCAKHLHLQVLKNEAYSSGDLATSVLKSFFRMDEMMKGQRGWRELAELGDKGQKFTGMLEGIIWSPKPGESDKPEDTWTEEGPHSHFPGPTSGSTACVAIIRNDELIVANAGDSRCVLSRKGRAYDLSKDHKPDLDAEKERILNAGGFIVAGRVNGSLNLARAIGDMELKQNEFLPAERQIVTAEPELNTVKLSEDDEFIVLACDGIWDCMSSQEVVDFVHKEMNTEDSLSAVCEKLLDHCLAPVSGGDGCDNMTVIIVKFKKPSKSAATSSTNQSVSSEEMRPNELDDGPSDPNK

SEQ ID NO: 457 - DNA, 2064 bp, Oryza sativa
  ref <308>: DATABASE ACCESSION NUMBER: LOC_Os02g48810
atggaagaagtcaaggaatctccagtacagccaacgactagtacagctcaaacaatcacttcaagtggcacagctgatttccaaggttttcatggagctcccaagtttgctgtcggagttcctaggaatctaccagctgttgctgccttgcctgctactgccccagtgacttctgcttccctggttaccttgaaaccacctggatcatctcctgtaaaatcagttaacaacccttcagttgttacaatgccccatatggctccatcgcatcttaaatcggataaaggagttaatggtcctcctaatctagtacgcaccggagcaacctatggcaacttgaacaaatcatttcatgatacatgtgctaggtccaatctgaacgctgtacagagttccaatccggtggcgaaaaatcaggacacaaagacagcatcaattgatgctacagcaggaaaccctcttacaggtcatcatgctacaccaagcgtggcacctgttcctccaaaacctacttttgctaaccacagtgaaatagcaaaaagtgttcaacgtgttctgcaccaaccagctaatcatcctagctggattccgccatcaactgagtacatgcgttctcgtttggactgtcaaatatgcaaagtagctatcatggatatggaaagtttgcttgtttgtgatgcttgtgagaagggagcacacttgaaatgccttcagcattatggtaataaaggtgttcctaaagctgagtggcattgtccaacatgcctgacaaagagtaagggcaagcctttgccaccaaaatatggcaaggttacaagaactgctgtcgaaccaaaggctactccaccaccagctggaacgcaggtttcttcgcaaggagcggcagaaaatattgctgtaaaggaaaatcaccaaaaagtggctgtaaatggtaatcttctgaatcaaaactccacgcaagctggcagtgttgctcagagcagtactgttttggctctaggtgttactgctgctgttgcacaatcacagccgctttctatatccagacttccagaaggaaatttaaataatgatgcagccttatctagtgaaaagacggggaatgtgggtccttgcagtagcattgcacatcgtaatgaaaagccccctgatgaactacagagcagtggactgcctgctaacagtaagactggaacccaatcagggaaatctcctaatgaagaagtgtccagtgtattagtttcaggcagtgcggattcaacaaatgataccttgcatgagcagaaatctcatgaaatttctggggaaaaatgctcagacaactcttctattgttgcttctgaagcaaatatcaagtcaaaagcagactctgagctcatttcgggcagagatgtggaaatggttgataatgatataccaccaaaggatcaaaccaacaacattgccactgaggacaaacccagtactcaagaaacctctgaagcacataaaatggaagttgtggaggtgagcgccaatactggaatacaaataagccagggtgacagtgctggcactgaagagaatctccacactgaagtaacttctgttccacacatgatcaatgatgtggcaatggctaccaatgctggaacaccaatatgtccaagcaacaacgttgccattgaagaaaagcccaagtctactgtaatttccgaggtatgtacaaccaaagatacggaaatgactactgatgccactttagatcaaaacaccaatgttgctacagaagaaattcctttgcctgaatcaatttctgcaactgaggatgctgacatgactactgatactggaataccaacaaatcaaagacaggaagtaaatggattggctgaaaatggcagaaaagaacatcccctgggagaaacagataaacacaaatctgaccatagtacgatgcctgatatgtctacagccccacagataacatcaaatggagttatgcattcaaaagatgaagctgcatgtggccatgaaggtgaaattgtggacatcagtgcagcagcaacagaggaaaacaattag

SEQ ID NO: 458 - protein, 687 aa, Oryza sativa
  ref <308>: DATABASE ACCESSION NUMBER: LOC_Os02g48810
MEEVKESPVQPTTSTAQTITSSGTADFQGFHGAPKFAVGVPRNLPAVAALPATAPVTSASLVTLKPPGSSPVKSVNNPSVVTMPHMAPSHLKSDKGVNGPPNLVRTGATYGNLNKSFHDTCARSNLNAVQSSNPVAKNQDTKTASIDATAGNPLTGHHATPSVAPVPPKPTFANHSEIAKSVQRVLHQPANHPSWIPPSTEYMRSRLDCQICKVAIMDMESLLVCDACEKGAHLKCLQHYGNKGVPKAEWHCPTCLTKSKGKPLPPKYGKVTRTAVEPKATPPPAGTQVSSQGAAENIAVKENHQKVAVNGNLLNQNSTQAGSVAQSSTVLALGVTAAVAQSQPLSISRLPEGNLNNDAALSSEKTGNVGPCSSIAHRNEKPPDELQSSGLPANSKTGTQSGKSPNEEVSSVLVSGSADSTNDTLHEQKSHEISGEKCSDNSSIVASEANIKSKADSELISGRDVEMVDNDIPPKDQTNNIATEDKPSTQETSEAHKMEVVEVSANTGIQISQGDSAGTEENLHTEVTSVPHMINDVAMATNAGTPICPSNNVAIEEKPKSTVISEVCTTKDTEMTTDATLDQNTNVATEEIPLPESISATEDADMTTDTGIPTNQRQEVNGLAENGRKEHPLGETDKHKSDHSTMPDMSTAPQITSNGVMHSKDEAACGHEGEIVDISAAATEENN

SEQ ID NO: 459 - DNA, 768 bp, Oryza sativa
  ref <308>: DATABASE ACCESSION NUMBER: LOC_Os05g50310
atggaattcaggggccatgacgaacccgtcgacgagatgggagtcgcgtacggcaggacgccaccctcctcctcctcctcccccgccgcctccgcctccgcggggaacggcgccggcgcggcggaggtgaggtaccacgagtgcctgcgcaaccacgccgcggcgatgggcggccacgtcgtggacggatgcagggagttcatgccgatgccgggggacgccgccgacgccctcaagtgcgccgcctgcggctgccaccgcagcttccaccgcaaggacgacgggcagcagcagcagcagctgcgcctgctcatcccgtccccgcccacgccgcgcgtcccgctgctcatgccgccgccgcagccgcagccgcacccgcacccgcaacacccctacctgcacccgccgttcccgtaccaccacaccccaagcggcagcggcggcacgacgaccgagtcgtccagcgaggagcgggggcctccctcctcgtcggcggcggcggcgcaggggcggcggaagcggttccggaccaagttcacgccggagcagaaggagcagatgctggcgttcgcggagcgggtggggtggcggatgcagaagcaggacgaggcactcgtcgaacagttctgcgcgcaggtcggcgtgcggcgccaggtgttcaaggtgtggatgcacaacaacaagagcagcatcggcagcagcagcggcggcggcagtaggaggcagccgcaggagcaacagtcacaacagcagcagcagcagcagtag

SEQ ID NO: 460 - protein, 255 aa, Oryza sativa
  ref <308>: DATABASE ACCESSION NUMBER: LOC_Os05g50310
MEFRGHDEPVDEMGVAYGRTPPSSSSSPAASASAGNGAGAAEVRYHECLRNHAAAMGGHVVDGCREFMPMPGDAADALKCAACGCHRSFHRKDDGQQQQQLRLLIPSPPTPRVPLLMPPPQPQPHPHPQHPYLHPPFPYHHTPSGSGGTTTESSSEERGPPSSSAAAAQGRRKRFRTKFTPEQKEQMLAFAERVGWRMQKQDEALVEQFCAQVGVRRQVFKVWMHNNKSSIGSSSGGGSRRQPQEQQSQQQQQQQ

SEQ ID NO: 461 - DNA, 2910 bp, Oryza sativa
  ref <308>: DATABASE ACCESSION NUMBER: LOC_Os03g61760
atggaggctgcccgggtcggggcgcagagccgccacctgtacggcggagggctaggcgagcctgacatggacaggcgcgacaagaggctgttcggctgggacctcaacgactggcggtgggacagtgaccgcttcgtcgctacgccggtgcccgccgcggaggcgagcggcttggcgctgaacagctcgccgtcttcctccgaggaagccggggccgcgtcggtgagaaatgttaatgctagaggtgactccgataagaggaagcgggtggtggtcattgatgatgatgatgtggaggatgacgagctggtggagaacggcggcgggtcactgagcttgagaattgggggtgatgctgttgcccatggagcaggggtgggtggtggtgctgatgaggaagacaggaatggcaaaaagatcagggtgcagggaggcagtcctagtggccccgcgtgccaggtggagggctgcactgcggaccttactggtgtgagggattaccatcgacgacacaaggtctgcgagatgcatgccaaggctaccactgctgtggttgggaacactgtccagcggttctgccaacaatgtagtagattccaccctcttcaagaatttgatgaagggaagcgaagttgccgccgacgtttagcaggccacaacagacgaaggaggaagacccgccctgaagttgctgttggtggttctgcatttactgaggacaaaattagcagttatttattgttgggtctccttggagtatgcgccaatttgaatgctgacaatgctgagcatttaagaggtcaggagttgatatctggtcttttgagaaacctgggggcagttgccaaatcattggatccaaaagaactctgtaaactcttggaggcatgccaaagcatgcaagatggatcaaatgctgggacctctgaaacagctaatgctttggtaaatactgctgtagcagaggctgcagggccatctaactctaagatgccttttgtgaacggtgatcaatgtggcctggcatcatcatctgttgtaccagtacaatcaaagtctcccactgttgcaactcctgaccctccagcatgcaaatttaaagattttgatttgaatgacacttatggtggcatggaaggtttcgaggatgggtatgaaggttcacctacaccagctttcaagacaactgattctcccaattgtccatcatggatgcaccaagattctactcaaagcccaccacagactagtggcaattcagattcaacatcagctcagtcactgtcaagctcaaatggagatgctcagtgtcggactgataaaattgtcttcaagcttttcgagaaagttcctagtgatttacctccagttttgcgatcacagattcttggttggttgtccagtagccctactgatatagagagctatattagacctggttgtattattttaacagtatatcttcgcttagttgagtctgcatggaaagagctctctgataatatgagctcatacctggataagcttctgaatagttccaccggcaacttttgggcatctggtttggtatttgtaatggtacggcatcagatagctttcatgcataatggtcaacttatgttggacagaccacttgcaaacagtgctcatcattactgcaagattttatgtgtgagaccaattgctgctcctttttcaacaaaagtgaatttcagggtagaaggcttgaacctagtcagtgattcctcaaggctaatttgctcatttgaagggagttgtatattccaggaagacaccgataatatagttgatgacgttgagcatgatgatattgaatatctgaacttctgttgtcctctccctagttcaagagggagaggatttgtggaggttgaagatggtggatttagcaacggcttcttccctttcataattgctgagcaggacatatgctctgaggtctgtgagctggagagcatatttgagtcctccagtcatgaacaggcagatgatgacaatgccaggaaccaagctttagagtttctaaatgagctgggctggcttcttcatagagcaaacataatatctaaacaggataaggttcctctagcatcctttaacatatggagattcagaaatcttggtatatttgccatggagcgggaatggtgtgctgtgaccaaactgctgttagatttcttatttactggactcgttgatatcgggtcccagtctccagaagaggtggtgttgtcagaaaatctgctacatgctgccgtgcggatgaaatctgcccaaatggttaggtttctgctgggatacaagccaaatgaaagcctgaagagaactgcagagacattcctattcagacctgatgctcaaggcccttccaaatttacccccctccatatagcagctgccacagatgatgcagaggatgtattggatgcacttactaatgatcctggactggttgggatcaacacgtggagaaacgcgcgagacggcgcaggcttcaccccagaagactacgctcgccagaggggcaacgatgcttacctgaatatggtcgagaagaagatcaataagcatcttggcaaaggccatgttgtcctcggcgtccctagcagcatacaccctgtaataaccgatggtgtgaagcctggtgaagtcagcctggagatcggcatgaccgtgccgccgccagcaccgagctgcaacgcctgcagccgtcaggccctgatgtaccccaactcgacggcgaggaccttcctgtacaggccagcgatgctgaccgtgatgggcatcgccgtcatctgcgtctgcgtcggcctgctactccacacctgtccaaaggtttatgcagctcctacattcagatgggagctgttagaacgtggaccaatgtga

SEQ ID NO: 462 - protein, 969 aa, Oryza sativa
  ref <308>: DATABASE ACCESSION NUMBER: LOC_Os03g61760
MEAARVGAQSRHLYGGGLGEPDMDRRDKRLFGWDLNDWRWDSDRFVATPVPAAEASGLALNSSPSSSEEAGAASVRNVNARGDSDKRKRVVVIDDDDVEDDELVENGGGSLSLRIGGDAVAHGAGVGGGADEEDRNGKKIRVQGGSPSGPACQVEGCTADLTGVRDYHRRHKVCEMHAKATTAVVGNTVQRFCQQCSRFHPLQEFDEGKRSCRRRLAGHNRRRRKTRPEVAVGGSAFTEDKISSYLLLGLLGVCANLNADNAEHLRGQELISGLLRNLGAVAKSLDPKELCKLLEACQSMQDGSNAGTSETANALVNTAVAEAAGPSNSKMPFVNGDQCGLASSSVVPVQSKSPTVATPDPPACKFKDFDLNDTYGGMEGFEDGYEGSPTPAFKTTDSPNCPSWMHQDSTQSPPQTSGNSDSTSAQSLSSSNGDAQCRTDKIVFKLFEKVPSDLPPVLRSQILGWLSSSPTDIESYIRPGCIILTVYLRLVESAWKELSDNMSSYLDKLLNSSTGNFWASGLVFVMVRHQIAFMHNGQLMLDRPLANSAHHYCKILCVRPIAAPFSTKVNFRVEGLNLVSDSSRLICSFEGSCIFQEDTDNIVDDVEHDDIEYLNFCCPLPSSRGRGFVEVEDGGFSNGFFPFIIAEQDICSEVCELESIFESSSHEQADDDNARNQALEFLNELGWLLHRANIISKQDKVPLASFNIWRFRNLGIFAMEREWCAVTKLLLDFLFTGLVDIGSQSPEEVVLSENLLHAAVRMKSAQMVRFLLGYKPNESLKRTAETFLFRPDAQGPSKFTPLHIAAATDDAEDVLDALTNDPGLVGINTWRNARDGAGFTPEDYARQRGNDAYLNMVEKKINKHLGKGHVVLGVPSSIHPVITDGVKPGEVSLEIGMTVPPPAPSCNACSRQALMYPNSTARTFLYRPAMLTVMGIAVICVCVGLLLHTCPKVYAAPTFRWELLERGPM

SEQ ID NO: 463 - DNA, 1089 bp, Oryza sativa
  ref <308>: DATABASE ACCESSION NUMBER: LOC_Os09g27450
atggagctggggttgagcttgggggaggctatggcggatgctgggagggagctggttcttgggcttgggatggggaggagggaggaggcggcggaggcggggaggagggatcatgaggtgaggagggagctggagttcgggtcgatgtcgagcaggtgcggtggttcttcgccggagccgacggtgcggctcacgcttctgcccatggtgcccggccttggcctcccatggccgccgccgccgccgccgtcgtccgagagcaggcatttggaggcgtcgacgcggggattcgacgtgaaccgcccgccgtcgtccggcggcggcggcggcggcggcggcgcggaggaggagcaggacgacgtggccggggcggcactctcgtcgtcccccaacaacagcgccggatccttcccgatggatgacttctccgggcacggcctcggcggcaacgacgcggcccctggcggtggcggcggcgaccgctcgtgctcccgcgccagcgacgaggacgacggcggctccgcgcgcaagaagctccgcctctccaaggagcagtccgcgttcctcgaggagagcttcaaggagcacagcaccctaaaccccaagcagaagctggcgctggcgaagcagctcaacctccggccgcgccaggtggaggtgtggttccagaaccgccgcgccaggacgaagctgaagcagacggaggtggactgcgagtacctgaagcggtgctgcgagacgctgacggaggagaaccggcggctgcagaaggagctcgccgagctccgggcgctcaagacggtgcaccccttctacatgcacctcccggcgacgacactctccatgtgcccctcctgcgagcgcgtcgcctccaactccgccccggccaccgcctcctccgccgcaacatcgtcgacggccgcgccgcccgcggcaccctcatccggcggcattgcggccacctcctcctccgccgccgccgccgcggcgccggaccacaggccgtcgtcgttcgccgcgctgttctcgtcgccgcgtggcttcccgctatccgtagccccgcaggcgcagccgccgacgagctcgtga

SEQ ID NO: 464 - protein, 362 aa, Oryza sativa
  ref <308>: DATABASE ACCESSION NUMBER: LOC_Os09g27450
MELGLSLGEAMADAGRELVLGLGMGRREEAAEAGRRDHEVRRELEFGSMSSRCGGSSPEPTVRLTLLPMVPGLGLPWPPPPPPSSESRHLEASTRGFDVNRPPSSGGGGGGGGAEEEQDDVAGAALSSSPNNSAGSFPMDDFSGHGLGGNDAAPGGGGGDRSCSRASDEDDGGSARKKLRLSKEQSAFLEESFKEHSTLNPKQKLALAKQLNLRPRQVEVWFQNRRARTKLKQTEVDCEYLKRCCETLTEENRRLQKELAELRALKTVHPFYMHLPATTLSMCPSCERVASNSAPATASSAATSSTAAPPAAPSSGGIAATSSSAAAAAAPDHRPSSFAALFSSPRGFPLSVAPQAQPPTSS

SEQ ID NO: 465 - DNA, 939 bp, Oryza sativa
  ref <308>: DATABASE ACCESSION NUMBER: LOC_Os03g61110
atgaatcctctgacgcaggtgaagaggacgcaggtaatcaaccagaaggaagcgcttctgggcatcggcgaggacgggtcgtggcacgccaagttcaaggactccgcctacgtcttcgtcggcggcatcccctacgacctcaccgagggcgacctcctcgccgtgttcgcgcagtacggcgaggtggtcgatgtgaacctcgtgcgcgacaagggcaccggaaaatccaagggatttgcgtttcttgcgtacgaggaccagaggagcacgattcttgctgttgataatttgaatggagctaaagttcttgggaggattgtaagagttgatcatgtgagcaaatacaagaaaaaggaggaggaggatgaggaggagctgcagaagaagagggaggcccgtggcgtgtgctacgcgttccagaaaggcgaatgcaaccgtggagcttcctgcagatattcccatgatgagcagaggaatgcaaacactggttggggttctaaggaggagagcaaagcaagatgggagcatgacagacaccatgagccaccgatgagccacaagaagttcccttcgagtgctggggaacaaaggttccctgacagagctaaagaggagaacaaatcaactggcagggaagggcagtcctcaagatcggaggcatacaaagaccgtgattccaggcttaggcatagtgatagaggttcaaaagatcatgacaggtataggcatgatagatcacctgagagatcaagaggtgataggcagagaaacaatgacagatatgcccaaggaagagatgaaaaatcagaaaggtacagatctgaagtgaaacatgatgaaggagaccagaagcgatcaaggcgggacactgattctagtggacattatgaaaggaggggtaacgaagattcagaaaggtacaggaaatcacggagataa

SEQ ID NO: 466 - protein, 312 aa, Oryza sativa
  ref <308>: DATABASE ACCESSION NUMBER: LOC_Os03g61110
MNPLTQVKRTQVINQKEALLGIGEDGSWHAKFKDSAYVFVGGIPYDLTEGDLLAVFAQYGEVVDVNLVRDKGTGKSKGFAFLAYEDQRSTILAVDNLNGAKVLGRIVRVDHVSKYKKKEEEDEEELQKKREARGVCYAFQKGECNRGASCRYSHDEQRNANTGWGSKEESKARWEHDRHHEPPMSHKKFPSSAGEQRFPDRAKEENKSTGREGQSSRSEAYKDRDSRLRHSDRGSKDHDRYRHDRSPERSRGDRQRNNDRYAQGRDEKSERYRSEVKHDEGDQKRSRRDTDSSGHYERRGNEDSERYRKSRR

SEQ ID NO: 467 - DNA, 1338 bp, Oryza sativa
  ref <308>: DATABASE ACCESSION NUMBER: LOC_Os07g45170
atggggtgcgcgcaggggaagtgctgcgtgccgcggcggcagaggggacgcggcggcggcggggcggtgggtgggcgcggcggcgcgacgctggggcgggtggcggtgccgggggcggggctggtgctggagtacgcgacgctggcggtggcggggctgtacccggactcgcccgggagggagtcgcaggacgcgcacctggtggcgacgcggttcgcggggcaccccgacctccacctgttcgcggtgttcgacgggcacggcgcgtgcggcgccgcgtgcgccgggttcgcgcgcgacgcgctcccgcggctgctcgcgggggtgggggtgggggcgggggaggagggaggggggaggatggtggtggtggaggaccccgcggcggcgttccgggaggcgctcccggcggcgaacgcggagatgcacgcggcggacgaggtggacgactcgatgagcgggaccaccgccgtggcggcgctggtggcggggggtgcgctccacgtggccaacgtgggggactcacgcgccgtggccggggtttggcgcgaggggcgcgtggcggcggaggagctctcgtgggaccagacgccgttccgcgccgacgagcgcgcccgcgtgaaggcgtgcggcgcgcgggtgatgtcggtcgagcaggtggagggcgtgcgcgacccggaggcggagagctgggtcgccgacgagggggacccacctcgcgtgtgggcgcgcgacgggctctaccccggcacggccttcacgcgcagcctcggcgaccaagccgccgaggctgttggtgtcatcgccgaacctgaggtgaaaagtgtagagatcactccagcccacctattcttcgtcgtcgcaagcgatggcgtgtttgagtttctctccagccaggatgtcgtggacatgtgtgtcaacttgtcagcctttggcttatatgaagcatccgatgttccaagaactggtgttgcagctaagcttatgaaatgtttgaatgaaaatgggataagcccagcctctacatccaaactagatgtacacagccaaaaacccaaccagagtatgactttggcatatgttctgttcaggggaagcatgaaattgctccagtgggacacagaagtaagcttaatgcttaatgcttttgttaagatcaccaatacaaagacaaagtggtatatgttagttccaattaggattttgatgagcatagtgttgcatgctagggtgcgcaaaacctctatgtaccgtgatgtttattccctgtggattacggaacatcatcaacgtttcacggattacagtgaaggggaggttatctgtggagtcatctag

SEQ ID NO: 468 - protein, 445 aa, Oryza sativa
  ref <308>: DATABASE ACCESSION NUMBER: LOC_Os07g45170
MGCAQGKCCVPRRQRGRGGGGAVGGRGGATLGRVAVPGAGLVLEYATLAVAGLYPDSPGRESQDAHLVATRFAGHPDLHLFAVFDGHGACGAACAGFARDALPRLLAGVGVGAGEEGGGRMVVVEDPAAAFREALPAANAEMHAADEVDDSMSGTTAVAALVAGGALHVANVGDSRAVAGVWREGRVAAEELSWDQTPFRADERARVKACGARVMSVEQVEGVRDPEAESWVADEGDPPRVWARDGLYPGTAFTRSLGDQAAEAVGVIAEPEVKSVEITPAHLFFVVASDGVFEFLSSQDVVDMCVNLSAFGLYEASDVPRTGVAAKLMKCLNENGISPASTSKLDVHSQKPNQSMTLAYVLFRGSMKLLQWDTEVSLMLNAFVKITNTKTKWYMLVPIRILMSIVLHARVRKTSMYRDVYSLWITEHHQRFTDYSEGEVICGVI

SEQ ID NO: 469 - DNA, 2025 bp, Oryza sativa
  ref <308>: DATABASE ACCESSION NUMBER: LOC_Os08g38990
atggacgggaccaacaaccatggagcactgatggacgattggatgcttccctcacccagtccaagaacactcatgtcgagtttcttgaacgaagaattcagctccggtcccttttcagacattttctgtgataatggcagtaacaaacatcaggatggacttgggaagagcaaagctttcatcgattcaagccgggaagaaactgctcagctagcaaaaaagtttgaatcaaacctttttggtgccaaccagaaatcaagctcaaatggctgtctgtcagagaggatggctgcaaggacaggttttggtgtcctgaaaattgatacatctcgtgtcggttattctacaccgattcggtctccggtgacgatcccgcccggtgtgagtccaagggaacttcttgagtcgccggtttttcttccgaacgccattgcacaaccttctcctaccactggcaaactgccatttttgatgcatagtaatgttaaaccatcgatccctaaaaaaactgaagatgaaacacgccatgatcgtgtattcttctttcaacccattttgggatctaagccaccaacttgtccagttgcagagaagggtttcagtgttaatcatcaaaaccagccttcagtgacggataatcaccaggagctcagtcttcagtctagctcaactgcagccaaggatttcacttcagcaactattgttaaacctaagacatctgattccatgttagacaatgatgatcacccttcccctgcaaatgatcaagaagagaatgcaacaaacaaaaatgaagagtattcttcagacctgatcattacccctgctgaggatggatataactggaggaaatatggacagaagcaagttaagaacagtgagcatcccagaagctactacaaatgcactttcacgaattgcgctgtcaagaaggtggagcgttctcaagatggccaaataacagagatagtctacaaaggttctcacaatcaccctttgccgccttccaaccgccgaccaaatgttcctttctcacacttcaatgatctgagagatgatcactctgagaaatttggttccaagtctggtcaggccacagcaacttcatgggagaatgccgcaaatggacacctccaagatgtcggtagtgaagttctgacaaaactgtctgcttctcttacgacaacagaacatgctgaaaaatctgttatggacaaacaagaagctgtggatatctcatcgacgctctccaatgaagaggatgatagggtaacgcatcgtgccccgctttctctgggctttgatgcgaacgatgactatgttgaacacaagagaagaaagatggatgtttatgccgctactagcactagcaccaacgccatcgacataggagctgtggcgtcaagagctatccgggagcctcgcgttgttgttcagaccacaagtgaggttgacatccttgatgatggttaccgttggcgcaagtatgggcagaaagttgtcaaaggaaacccaaatccaaggagctactacaagtgcactcatccgggttgctcggtgcgcaagcatgtggagcgatcatcgcatgatctgaaatccgtcatcacgacgtatgaaggaaagcacaaccatgaagttccagctgccaggaacagtggccacccaagctcaggctcagccgctgcaccacaggctaccaatggtcttcttcaccggagacctgaaccggcacaaggtggtggtggtggtagccttgctcagtttggctatggctcagctggtcacagaccagcagagcagtttggtgcagcagcagctggtttctcctttggaatgctgcctcgtagcattgcaactccggcgccgtctccggcgatcgccgtgccggcgatgcaggggtacccagggcttgtgctgccgagaggtgagatgaaggtgaacttgctgccacagtctgggaatgctggtgcagcagctagccagcagctgatgggcaggttgccaaagcagcatcctcagatgtaa

SEQ ID NO: 470 - protein, 674 aa, Oryza sativa
  ref <308>: DATABASE ACCESSION NUMBER: LOC_Os08g38990
MDGTNNHGALMDDWMLPSPSPRTLMSSFLNEEFSSGPFSDIFCDNGSNKHQDGLGKSKAFIDSSREETAQLAKKFESNLFGANQKSSSNGCLSERMAARTGFGVLKIDTSRVGYSTPIRSPVTIPPGVSPRELLESPVFLPNAIAQPSPTTGKLPFLMHSNVKPSIPKKTEDETRHDRVFFFQPILGSKPPTCPVAEKGFSVNHQNQPSVTDNHQELSLQSSSTAAKDFTSATIVKPKTSDSMLDNDDHPSPANDQEENATNKNEEYSSDLIITPAEDGYNWRKYGQKQVKNSEHPRSYYKCTFTNCAVKKVERSQDGQITEIVYKGSHNHPLPPSNRRPNVPFSHFNDLRDDHSEKFGSKSGQATATSWENAANGHLQDVGSEVLTKLSASLTTTEHAEKSVMDKQEAVDISSTLSNEEDDRVTHRAPLSLGFDANDDYVEHKRRKMDVYAATSTSTNAIDIGAVASRAIREPRVVVQTTSEVDILDDGYRWRKYGQKVVKGNPNPRSYYKCTHPGCSVRKHVERSSHDLKSVITTYEGKHNHEVPAARNSGHPSSGSAAAPQATNGLLHRRPEPAQGGGGGSLAQFGYGSAGHRPAEQFGAAAAGFSFGMLPRSIATPAPSPAIAVPAMQGYPGLVLPRGEMKVNLLPQSGNAGAAASQQLMGRLPKQHPQM

SEQ ID NO: 471 - DNA, 1275 bp, Oryza sativa
  ref <308>: DATABASE ACCESSION NUMBER: LOC_Os04g56990
atgttgcaagatatcatgaacaccaagaagattaagctgcacgactgccacttcggctcgccgctatgtgacccttcgccggcgccgcacctgctgagctccgccgccgccgccgggctgtcgttccacccggggctcgtgagctcggcggcgcagcaccagcagcacggcgcgggcggctggctgcacgaggagtactacgcgccgaggtcgtcgccgccgtcgtcgcttctcgcgcagacctgcgtcggctccaacgcgaccgcgttctacgccgccgagaacctgccgcagttcgacttcccagctctcggtacggcggcggcggcggcggccaaggcgccgttccggtcgtcggagagcgagctgtaccggccggtcgacccgctgctcctccgtgcggaccactcggtgaggacgtactacgtccggccgcagaagcgggattccggcgagaggacaccattgccgccgccgtcgcagcaacagcatcaggacagaatccacgggctcttcgccggcgctcccaccactcggcttctcagcggcgaacccaaaatccactcgtttccacctcaagtggcggcgaagccgattctgccggcgatggatgcgccgagcctgcagaaccagatggagaatcagctgacaaggaactgcatcggcgcggcaactccggtgacccccaccggaaacctcgccggatcaggtgcgccgagcaagacgcggatcaggtggacgcaggacctgcacgagcggttcgtcgactgcgtcaatcagctcggcggcgcagacaaggcaactccgaaggggattctgaagctgatgaattcggatggcctgacgatctaccacatcaagagccatctccagaaatatcgcatagcgaagtacatgccagcgtcatctgaagggaagcaactggagaaaagagcaacaggaaatgacatgcagaatctggaccccaaaactggaatgcaaatcacggaagcactgcgtgttcagctcgacgtgcagaggcgcctccatgaacagctagagattcagagaaatctgcagctgaggatagaggagcaggggaagaggctgcagaagatgttcgaggaccagctgaaggcgagcaggagcgtgatggaaccgcaggagctggacgacgtcgtcgccttcgccgccggcgacggagacgacgacgcgttcgatgacgtcgacgtgcagctgctggccgtcgctggcagcggctatgacgacgccgggttccagtccaaaataagctag

SEQ ID NO: 472 - protein, 424 aa, Oryza sativa
  ref <308>: DATABASE ACCESSION NUMBER: LOC_Os04g56990
MLQDIMNTKKIKLHDCHFGSPLCDPSPAPHLLSSAAAAGLSFHPGLVSSAAQHQQHGAGGWLHEEYYAPRSSPPSSLLAQTCVGSNATAFYAAENLPQFDFPALGTAAAAAAKAPFRSSESELYRPVDPLLLRADHSVRTYYVRPQKRDSGERTPLPPPSQQQHQDRIHGLFAGAPTTRLLSGEPKIHSFPPQVAAKPILPAMDAPSLQNQMENQLTRNCIGAATPVTPTGNLAGSGAPSKTRIRWTQDLHERFVDCVNQLGGADKATPKGILKLMNSDGLTIYHIKSHLQKYRIAKYMPASSEGKQLEKRATGNDMQNLDPKTGMQITEALRVQLDVQRRLHEQLEIQRNLQLRIEEQGKRLQKMFEDQLKASRSVMEPQELDDVVAFAAGDGDDDAFDDVDVQLLAVAGSGYDDAGFQSKIS

SEQ ID NO: 473 - DNA, 1170 bp, Oryza sativa
  ref <308>: DATABASE ACCESSION NUMBER: LOC_Os02g13100
atggggatctgtgcatcttcagagcagctggagcatgttcatgagacagatgagagcattgtgtatgtgaaggatgagcaaggaagggggggtaggggggtggagagtgggggggctaggaaggtggcctccctcttctcccagaggggcaagaaaggccccaaccaggactctgtcatcctctgccagggattcggcatggaggacggcgtgttctgcggcgtgttcgacggccatggccggtgcgggcaattcatcagcaagctggtgcgggactacctcccgttcatgatcctgagccaccggaacgcgctgctcctggccgacgccgccgccgacgacgacgacgacgccgcgttcagcgacgacgcggcggcgtcgtcgtccgcggacagcagcggcaactcgtcgccgcagccgtcggcgtcggcgtcggcgcagatgctggaggagtggaggcaggcgtgcgccagcgcgttcgccgccatggacggcgagctcaagctccagccgaacctcgactgcgcgttcagcggcacgacggcggtgtgcgccatcaagcagggcagggacctcatcatcgccaacctcggcgactcgagggcggtgctcgccaccatgtcggacaccggctacctccaggcggtgcagctgacggtggaccacaagccgagcgtgccggaggaggcggcgaggatcaagcggagcggggggagggtgttcgggctgaaggacgagccgggggtgatgcgggtgtggctccccggcgagaactcgccggggctcgccatggcgaggtcgctgggcgacatgaggctgaagcggcacggcgtgatcccggcgccggaggtgacgtcgcggcgcgtgacgggcgccgacctgttcatggtgctcgccacggacggggtgtgggacgtgctgagcaacgaggaggtggtgtccatcgtgtgcgcgacgccgcggaagcagcacgcgtcgaaggcggtggtggaggccgccgtgcagcggtggcgggccaagttcccgacgtccagggtggacgactgctccgccgtctgcctcttcctccacgaccacaccctcggcacggccgccgccgcctccgccgcagccgccgcggccgccagaaaggcgcgcagggcctccaccgccacgccgccggcgagctga

SEQ ID NO: 474 - protein, 389 aa, Oryza sativa
  ref <308>: DATABASE ACCESSION NUMBER: LOC_Os02g13100
MGICASSEQLEHVHETDESIVYVKDEQGRGGRGVESGGARKVASLFSQRGKKGPNQDSVILCQGFGMEDGVFCGVFDGHGRCGQFISKLVRDYLPFMILSHRNALLLADAAADDDDDAAFSDDAAASSSADSSGNSSPQPSASASAQMLEEWRQACASAFAAMDGELKLQPNLDCAFSGTTAVCAIKQGRDLIIANLGDSRAVLATMSDTGYLQAVQLTVDHKPSVPEEAARIKRSGGRVFGLKDEPGVMRVWLPGENSPGLAMARSLGDMRLKRHGVIPAPEVTSRRVTGADLFMVLATDGVWDVLSNEEVVSIVCATPRKQHASKAVVEAAVQRWRAKFPTSRVDDCSAVCLFLHDHTLGTAAAASAAAAAAARKARRASTATPPAS

SEQ ID NO: 475 - DNA, 7 bp, Zea mays
accagta

SEQ ID NO: 476 - DNA, 6 bp, Zea mays
cgcggc

SEQ ID NO: 477 - DNA, 6 bp, Zea mays
gaccac

SEQ ID NO: 478 - DNA, 7 bp, Zea mays
agagata

SEQ ID NO: 479 - DNA, 6 bp, Zea mays
acacat

SEQ ID NO: 480 - DNA, 7 bp, Zea mays
ggccaca

SEQ ID NO: 481 - DNA, 6 bp, Zea mays
aaaagc

SEQ ID NO: 482 - DNA, 7 bp, Zea mays
atgtgtc

SEQ ID NO: 483 - DNA, 7 bp, Zea mays
cacacac

SEQ ID NO: 484 - DNA, 7 bp, Zea mays
ctcactc

SEQ ID NO: 485 - DNA, 6 bp, Zea mays
acgtcg

SEQ ID NO: 486 - DNA, 7 bp, Zea mays
aaaagta

SEQ ID NO: 487 - DNA, 6 bp, Zea mays
cgagca

SEQ ID NO: 488 - DNA, 6 bp, Zea mays
acgtga

SEQ ID NO: 489 - DNA, 6 bp, Zea mays
gtgtga

SEQ ID NO: 490 - DNA, 6 bp, Zea mays
gtagta

SEQ ID NO: 491 - DNA, 7 bp, Zea mays
cacacac

SEQ ID NO: 492 - DNA, 6 bp, Zea mays
cgcggc

SEQ ID NO: 493 - DNA, 6 bp, Zea mays
gaccac

SEQ ID NO: 494 - DNA, 6 bp, Zea mays
acacat

SEQ ID NO: 495 - DNA, 6 bp, Zea mays
taaagg

SEQ ID NO: 496 - DNA, 6 bp, Zea mays
acggcc

SEQ ID NO: 497 - DNA, 5 bp, Zea mays
acgtc

SEQ ID NO: 498 - DNA, 5 bp, Zea mays
cgtta

SEQ ID NO: 499 - DNA, 6 bp, Zea mays
ctctcc

SEQ ID NO: 500 - DNA, 5 bp, Zea mays
acgac

SEQ ID NO: 501 - DNA, 6 bp, Zea mays
acgtgc

SEQ ID NO: 502 - DNA, 7 bp, Zea mays
cggaaag

SEQ ID NO: 503 - DNA, 5 bp, Zea mays
aacgt

SEQ ID NO: 504 - DNA, 5 bp, Zea mays
caacg

SEQ ID NO: 505 - DNA, 5 bp, Zea mays
acgga

SEQ ID NO: 506 - DNA, 5 bp, Zea mays
agcga

SEQ ID NO: 507 - DNA, 6 bp, Zea mays
cagcgg

SEQ ID NO: 508 - DNA, 5 bp, Zea mays
caacg

SEQ ID NO: 509 - DNA, 6 bp, Zea mays
actcgc

SEQ ID NO: 510 - DNA, 6 bp, Zea mays
aatacg

SEQ ID NO: 511 - DNA, 5 bp, Zea mays
actag

SEQ ID NO: 512 - DNA, 5 bp, Zea mays
acgta

SEQ ID NO: 513 - DNA, 5 bp, Zea mays
gccac

SEQ ID NO: 514 - DNA, 6 bp, Zea mays
agcgta

SEQ ID NO: 515 - DNA, 5 bp, Zea mays
gcgac

SEQ ID NO: 516 - DNA, 8 bp, Zea mays
cttacgcc

SEQ ID NO: 517 - DNA, 5 bp, Zea mays
aacgc

SEQ ID NO: 518 - DNA, 5 bp, Zea mays
gacgc

SEQ ID NO: 519 - DNA, 5 bp, Zea mays
ccgca

SEQ ID NO: 520 - DNA, 7 bp, Zea mays
cagcagc

SEQ ID NO: 521 - DNA, 6 bp, Zea mays
cactcg

SEQ ID NO: 522 - DNA, 6 bp, Zea mays
ctttca

SEQ ID NO: 523 - DNA, 7 bp, Zea mays
cgatcga

SEQ ID NO: 524 - DNA, 7 bp, Zea mays
attgtcc

SEQ ID NO: 525 - DNA, 6 bp, Zea mays
ggcgaa

SEQ ID NO: 526 - DNA, 7 bp, Zea mays
tagctaa

SEQ ID NO: 527 - DNA, 7 bp, Zea mays
acgaatg

SEQ ID NO: 528 - DNA, 6 bp, Zea mays
cgcata

SEQ ID NO: 529 - DNA, 6 bp, Zea mays
atagta

SEQ ID NO: 530 - DNA, 7 bp, Zea mays
atttgtc

SEQ ID NO: 531 - DNA, 7 bp, Zea mays
cgccacg

SEQ ID NO: 532 - DNA, 6 bp, Zea mays
ccaatc

SEQ ID NO: 533 - DNA, 5 bp, Zea mays
ggcga

SEQ ID NO: 534 - DNA, 5 bp, Zea mays
agcgg

SEQ ID NO: 535 - DNA, 5 bp, Zea mays
ggcgg

SEQ ID NO: 536 - DNA, 63 bp, Sorghum bicolor
gaagcgagtggcgcgctggcggatgaggcggcgagtggcccggatgcaccggcgcaggcgagc

SEQ ID NO: 537 - DNA, 20 bp, Artificial Sequence
  Synthetic primer
ggttcgaggagaccctctac

SEQ ID NO: 538 - DNA, 21 bp, Artificial Sequence
  Synthetic primer
tttatgatgatgcaggagtcg

SEQ ID NO: 539 - DNA, 25 bp, Artificial Sequence
  Synthetic primer
gaacttcacagttggaaccatattt

SEQ ID NO: 540 - DNA, 19 bp, Artificial Sequence
  Synthetic primer
tagtgcgagggccatagat

SEQ ID NO: 541 - DNA, 21 bp, Artificial Sequence
  Synthetic primer
accacttcgaccgccactact

SEQ ID NO: 542 - DNA, 18 bp, Artificial Sequence
  Synthetic primer
acgcctaacctgctggtt

SEQ ID NO: 543 - DNA, 5 bp, Zea mays
cgcca

SEQ ID NO: 544 - DNA, 63 bp, Sorghum bicolor; identical to SEQ ID NO: 536

SEQ ID NO: 545 - DNA, 63 bp, Zea mays
gcagcgagtggcgcgctggcggatgaggcgccgagtggcccgcatccaccggcgcaggcgagc

SEQ ID NO: 546 - DNA, 63 bp, Setaria italica
gaagcgagtggcgcactggcggatgaggcgccgagtggcccggatccaccggcccaggcgagc

SEQ ID NO: 547 - DNA, 64 bp, Oryza sativa
cgcgcgtgtggcgcgctgggtgggtgaggcgccgagtggcccggatccacccgcccagccgggc

SEQ ID NO: 548 - DNA, 62 bp, Artificial Sequence
  Consensus sequence
gagcgagtggcgcgctggcggatgaggcgccgagtggcccggatccaccggcccaggcgagc

SEQ ID NO: 549 - DNA, 56 bp, Zea mays
gaggacgtaaccatggttcactgccgggccctttaaaagccgagccgggctcgtcc

SEQ ID NO: 550 - DNA, 56 bp, Sorghum bicolor
gaaaacgtaaccatggttaactccgggaccctttaaaagccgagccgggctcgtcc

SEQ ID NO: 551 - DNA, 60 bp, Setaria italica
cagaacgtaaccacggttaactctccggggcgccctttaaaagccccgccgggctcgtct

SEQ ID NO: 552 - DNA, 56 bp, Oryza sativa
gagcacctaaccatggttaactcgctgcccctttaaaagcgcacccggactccgcc

SEQ ID NO: 553 - DNA, 53 bp, Artificial Sequence
  Consensus sequence
gagacgtaaccatggttaactccggccctttaaaagcccagccgggctcgtcc
